United States Patent Application Publication US 2003/0194704 A1 - sequence listing, part 9

SEQ ID NO: 32484 - protein, 47 aa, Homo sapiens
  MAP TO AC002472.3; EXPRESSED IN BRAIN, SIGNAL = 1.2; EXPRESSED IN ADULT LIVER, SIGNAL = 1.3; EXPRESSED IN HELA, SIGNAL = 0.35; EXPRESSED IN HEART, SIGNAL = 1.3; EXPRESSED IN FETAL LIVER, SIGNAL = 1.3; EXPRESSED IN LUNG, SIGNAL = 1.6; SWISSPROT HIT: O43246, EVALUE 3.00e-22
GAYILVSTVLTLMVPWHSLDPDSALADAFYQRGYRWAGFIVAAGSIC

SEQ ID NO: 32485 - protein, 141 aa, Homo sapiens
  MAP TO AC002472.3; EXPRESSED IN BRAIN, SIGNAL = 1.2; EXPRESSED IN ADULT LIVER, SIGNAL = 1.3; EXPRESSED IN HELA, SIGNAL = 0.35; EXPRESSED IN HEART, SIGNAL = 1.3; EXPRESSED IN FETAL LIVER, SIGNAL = 1.3; EXPRESSED IN LUNG, SIGNAL = 1.6; SWISSPROT HIT: P21522, EVALUE 1.40e+00
TLMPEAEPPEAAGGLHHGDVTAALPVHAGPDSSGRGWHGGLGSLRAHRCRGQGGGWPCCALVLRCGRCGLPAGSPMLCRIWGTCATHGLCLPVHLRIHGRAVGLPHRLECSPRIHHRWRRRGPCLEWLPGLYVQPQHPQLH

SEQ ID NO: 32486 - protein, 153 aa, Homo sapiens
  MAP TO AF002994.1; EXPRESSED IN PLACENTA, SIGNAL = 3.4; EXPRESSED IN BONE MARROW, SIGNAL = 1.9; EXPRESSED IN LUNG, SIGNAL = 1.8; EXPRESSED IN ADULT LIVER, SIGNAL = 2.1; EXPRESSED IN BRAIN, SIGNAL = 1.9; SWISSPROT HIT: P43363, EVALUE 5.00e-46
ESSEYMQLIFGIDVKEVVPTGHSYVLVTSLGLSYDGMLVDDPSKPKTGLLIIVLCVIFTEGNCAPEEVMWEALNVIEVYAGREHFIYGEPRKLLTRDWVQENYLEYWQVPRSDPACYEEERVSAGDAARASGGWGGLVHVPGLHPAASPPCVT

SEQ ID NO: 32487 - protein, 44 aa, Homo sapiens
  MAP TO AF002994.1; EXPRESSED IN PLACENTA, SIGNAL = 3.4; EXPRESSED IN BONE MARROW, SIGNAL = 1.9; EXPRESSED IN LUNG, SIGNAL = 1.8; EXPRESSED IN ADULT LIVER, SIGNAL = 2.1; EXPRESSED IN BRAIN, SIGNAL = 1.9; SWISSPROT HIT: Q13370, EVALUE 2.90e+00
SRRLLRFHFQGILRVHAADLWHRREGSGPHRPFLCPCHLSGPLL

SEQ ID NO: 32488 - protein, 158 aa, Homo sapiens
  MAP TO AL132642.1; EXPRESSED IN LUNG, SIGNAL = 1.1; EXPRESSED IN BONE MARROW, SIGNAL = 1.2; EXPRESSED IN ADULT LIVER, SIGNAL = 1.2; SWISSPROT HIT: P46938, EVALUE 4.20e+00
MLLNFVNLASSDIKAALDKSAPCRRSVDHRKYLQKQLKRFSQKYSRLPRGLPGRAAEPYLKRGSEDRPRRLLLDLGPDSSPGGGGGCKEKVLRNPYREECLAKEQLPQRQHPEAAQPGQVPMRKRQLPASFWEEPRPTHSYHVGLEGGLGPREGPPYE

SEQ ID NO: 32489 - protein, 130 aa, Homo sapiens
  MAP TO AL132642.1; EXPRESSED IN LUNG, SIGNAL = 1.1; EXPRESSED IN BONE MARROW, SIGNAL = 1.2; EXPRESSED IN ADULT LIVER, SIGNAL = 1.2; SWISSPROT HIT: P48187, EVALUE 1.30e+00
SQGPPTATMWGWRGDWAPGRDLPMRVRKIARAWSPWDLRLPWCPCLQGPWLKRSRSRCLGSPWWAASMPGVAAPSSTMDSPSIRAPWGHCLRVLSPAWAFGGRAQPFPGSWRTSARMWTAWGRRCAGPWC

SEQ ID NO: 32490 - protein, 105 aa, Homo sapiens
  MAP TO AC004231.1; EXPRESSED IN HELA, SIGNAL = 1.3; EXPRESSED IN ADULT LIVER, SIGNAL = 1.2; EXPRESSED IN BRAIN, SIGNAL = 1.2; EXPRESSED IN BONE MARROW, SIGNAL = 1.4; EXPRESSED IN LUNG, SIGNAL = 1.2; SWISSPROT HIT: P35900, EVALUE 8.00e-56
MQRLGTTPSVYGGAGGRGIRISNSRHTVNYGSDLTGGGDLFVGNEKMAMQNLNDRLASYLEKVRTLEQSNSKLEVQIKQWYETNAPRAGRDYSAYYRQIEELRSQ

SEQ ID NO: 32491 - protein, 62 aa, Homo sapiens
  MAP TO AC004231.1; EXPRESSED IN HELA, SIGNAL = 1.3; EXPRESSED IN ADULT LIVER, SIGNAL = 1.2; EXPRESSED IN BRAIN, SIGNAL = 1.2; EXPRESSED IN BONE MARROW, SIGNAL = 1.4; EXPRESSED IN LUNG, SIGNAL = 1.2; SWISSPROT HIT: Q06561, EVALUE 2.50e+00
LPQKPELLLAGPCSQYSGHAAPRDDTQRLWGCWRPGHPHLQLQTHGELWERSHRRRGPVCWQ

SEQ ID NO: 32492 - protein, 243 aa, Homo sapiens
  MAP TO AP000354.1; EXPRESSED IN PLACENTA, SIGNAL = 3.6; EXPRESSED IN ADULT LIVER, SIGNAL = 1.9; EXPRESSED IN BONE MARROW, SIGNAL = 2.2; EXPRESSED IN LUNG, SIGNAL = 2.1; EXPRESSED IN HEART, SIGNAL = 2.5; SWISSPROT HIT: Q99323, EVALUE 3.00e-04
TASSTKRSTSTGNKESSSTRERLRERTRLNQSKKLPSAGQGANDMALAKRSRSRTATECDVRMSKSKSDNQISDRAALEAKVKDLLTLAKTKDVEILHLRNELRDMRAQLGINEDHSEGDEKSEKETIMAHQPTDVESTLLQLQEQNTAIREELNQLKNENRMLKDRLNALGFSLEQRLDNSEKLFGYQSLSPEITPDNQSDGGGTLTSSVEGSAPGSVEDLLSQDENTLMDHQHSNSMDNLD

SEQ ID NO: 32493 - protein, 26 aa, Homo sapiens
  MAP TO AP000354.1; EXPRESSED IN PLACENTA, SIGNAL = 3.6; EXPRESSED IN ADULT LIVER, SIGNAL = 1.9; EXPRESSED IN BONE MARROW, SIGNAL = 2.2; EXPRESSED IN LUNG, SIGNAL = 2.1; EXPRESSED IN HEART, SIGNAL = 2.5
LQPSGALLQVIKNPVLLEKDYVNVPD

SEQ ID NO: 32494 - protein, 101 aa, Homo sapiens
  MAP TO AC007595.3; EXPRESSED IN BRAIN, SIGNAL = 1.1; EXPRESSED IN ADULT LIVER, SIGNAL = 1.2; EXPRESSED IN HELA, SIGNAL = 2.3; EXPRESSED IN BONE MARROW, SIGNAL = 1.2; EXPRESSED IN LUNG, SIGNAL =   1; EXPRESSED IN FETAL LIVER, SIGNAL = 1.1; SWISSPROT HIT: P97857, EVALUE 3.80e+00
MEFLGTTQTASYCGPKKCCGLTSLPAVQAPVIQECYQPYYLPGYRYLNSWRPSLFYKIANVQTCPDESTSTLRPPTILPTLRSALFSRYSPHDWDQSNQLQ

SEQ ID NO: 32495 - protein, 64 aa, Homo sapiens
  MAP TO AC007595.3; EXPRESSED IN BRAIN, SIGNAL = 1.1; EXPRESSED IN ADULT LIVER, SIGNAL = 1.2; EXPRESSED IN HELA, SIGNAL = 2.3; EXPRESSED IN BONE MARROW, SIGNAL = 1.2; EXPRESSED IN LUNG, SIGNAL =   1; EXPRESSED IN FETAL LIVER, SIGNAL = 1.1; SWISSPROT HIT: P27590, EVALUE 9.30e-01
DKDQLTHQMQEGTCRNLGQRLSDIGFWKSELSYELDRLLTENQNLETVKRRLECAANEVNCPLQ

SEQ ID NO: 32496 - protein, 20 aa, Homo sapiens
  MAP TO AC007595.3; EXPRESSED IN BRAIN, SIGNAL = 1.1; EXPRESSED IN ADULT LIVER, SIGNAL = 1.2; EXPRESSED IN HELA, SIGNAL = 2.3; EXPRESSED IN BONE MARROW, SIGNAL = 1.2; EXPRESSED IN LUNG, SIGNAL =   1; EXPRESSED IN FETAL LIVER, SIGNAL = 1.1
WSFLGLLRPPVTVVPRNAVA

SEQ ID NO: 32497 - protein, 159 aa, Homo sapiens
  MAP TO AL121907.2; EXPRESSED IN ADULT LIVER, SIGNAL = 3.3; EXPRESSED IN PLACENTA, SIGNAL = 5.1; EXPRESSED IN BONE MARROW, SIGNAL = 2.9; EXPRESSED IN LUNG, SIGNAL = 3.3; EXPRESSED IN HEART, SIGNAL = 3.4; EXPRESSED IN FETAL LIVER, SIGNAL = 2.7; SWISSPROT HIT: P32644, EVALUE 5.00e-04
VRITKQLTLGRTVEPQDIAVLTPYNAQASEISKALRREGIAGVAVSSITKSQGEAGGSWVGPGGWAQRQQGLTSHPAGSEWRYVLVSTVRTCAKSDLDQRPTKSWLKKFLGFVVDPNQVNVAVTRAQEGLCLIGEGGAGLFQGGNTGEARAGLGSCRLL

SEQ ID NO: 32498 - protein, 383 aa, Homo sapiens
  MAP TO AC002039.1; EXPRESSED IN ADULT LIVER, SIGNAL = 1.3; EXPRESSED IN BRAIN, SIGNAL = 6.1; EXPRESSED IN HEART, SIGNAL = 1.6; EXPRESSED IN BONE MARROW, SIGNAL =   1; EXPRESSED IN LUNG, SIGNAL = 1.3; SWISSPROT HIT: P98161, EVALUE 0.00e+00
EYVLTVLASNAFENRTQQVPVSVRASLPSEAVGVSDGVLVAGRPVTFYPHLLPSPGGVLYTWDFGDGSPVLTQSQPAANHTYPSRGIYHVRLEVNNTVSGAAAQADVRVFEELRGLSVDMSLAVEQGAPVVVSAAVQTGDNITWTFDMGDGTVLSGPEATVEHVYLRAQNCTVTVGAASPAGHLARSLHVLVFVLEVLRVEPAACIPTQPDARLTAYVTGNPARYLFDWTFGDGSSNTTMRGCPTVTHNFTRSGTFPLALVLSSRVNRARYFTSICVEPEVGNVTLQPERQFVQLGDEARLVACAWPPFPYRYTWDFGTEEAVPARVGGPEVTFIYRDPGSYLVTVTASNNISAANDSALVEVQEPMLVTSIKVNGSLGLELQ

SEQ ID NO: 32499 - protein, 73 aa, Homo sapiens
  MAP TO AL022345.2; EXPRESSED IN BONE MARROW, SIGNAL = 6.9; EXPRESSED IN HEART, SIGNAL = 7.4; EXPRESSED IN FETAL LIVER, SIGNAL = 4.5; EXPRESSED IN LUNG, SIGNAL = 7.3; EXPRESSED IN ADULT LIVER, SIGNAL = 5.9; EXPRESSED IN PLACENTA, SIGNAL = 9.1; SWISSPROT HIT: P27951, EVALUE 7.60e+00
DAIRVFANSLLYIQRTKSMFQRTTYKYEMINKQNEQMHALLAIALTVYPMSIDESIHLQLQKKHRDKMLRMQK

SEQ ID NO: 32500 - protein, 20 aa, Homo sapiens
  MAP TO AL022345.2; EXPRESSED IN BONE MARROW, SIGNAL = 6.9; EXPRESSED IN HEART, SIGNAL = 7.4; EXPRESSED IN FETAL LIVER, SIGNAL = 4.5; EXPRESSED IN LUNG, SIGNAL = 7.3; EXPRESSED IN ADULT LIVER, SIGNAL = 5.9; EXPRESSED IN PLACENTA, SIGNAL = 9.1
CIPVCQSARSPHTIMLGLHI

SEQ ID NO: 32501 - protein, 179 aa, Homo sapiens
  MAP TO AC004000.1; EXPRESSED IN LUNG, SIGNAL =   1; EXPRESSED IN HELA, SIGNAL = 3.5; EXPRESSED IN ADULT LIVER, SIGNAL = 1.2; EXPRESSED IN BRAIN, SIGNAL = 0.95; EXPRESSED IN BONE MARROW, SIGNAL = 0.96; SWISSPROT HIT: P05141, EVALUE 2.00e-83
VQHASKQITADKQYKGIIDCVVRIPKEQGVLSFWRGNLANVIRYFPTQALNFAFKDKYKQIFLGGVDKRTQFWLYFAGNLASGGAAGATSLCFVYPLDFARTRLAADVGKAGAEREFRGLGDCLVKIYKSDGIKGLYQGFNVSVQGIIIYRAAYFGIYDTAKGKFAVGFNVVFLGDSLK

SEQ ID NO: 32502 - protein, 151 aa, Homo sapiens
  MAP TO AL022576.1; EXPRESSED IN BONE MARROW, SIGNAL = 7.2; EXPRESSED IN FETAL LIVER, SIGNAL = 6.2; EXPRESSED IN LUNG, SIGNAL =  11; EXPRESSED IN HEART, SIGNAL = 6.7; EXPRESSED IN ADULT LIVER, SIGNAL = 5.8; EXPRESSED IN PLACENTA, SIGNAL =  11; SWISSPROT HIT: O95916, EVALUE 6.00e-74
ANVMVDGKLVNLGLWNTAGQEDYDRLRPLSYPQADVFLICFSLVSPASFENVLAKWYPEVQHHCPNTPIILVGTKLDLRDDKDRIQKLKEKKLTPITYPQGLAMAKEMGAVKYLECLALTRRGLKTVFDEAIRAVLCPPPVKKRKRKCLQL

SEQ ID NO: 32503 - protein, 231 aa, Homo sapiens
  MAP TO AC069278.1; EXPRESSED IN FETAL LIVER, SIGNAL = 1.6; EXPRESSED IN HELA, SIGNAL = 2.6; EXPRESSED IN ADULT LIVER, SIGNAL = 1.3; EXPRESSED IN LUNG, SIGNAL = 1.2; EXPRESSED IN BONE MARROW, SIGNAL = 1.5; SWISSPROT HIT: Q9UJU3, EVALUE 2.00e-34
DTDPHVHHSTHLGEKSYKCDQYGKNFSQSQDLIVHCKTHSGETPYEFHEWPMGCKQSSDLPRYQKVPSGNKPYKCKECGKGFRCNSFLYNHHGVHTREMPYKCDACGKGFGFRSLLCIHQGVHTGKSPIKVKSVGRALIRAPTFLSIRESTLERSPTNAVSVASALVQAPFFKSTGGFTQGRNLIGVMSVERASAKVHTFTFTRESTQGRNHTNAMCVERILRIALFFTLI

SEQ ID NO: 32504 - protein, 18 aa, Homo sapiens
  MAP TO AC069278.1; EXPRESSED IN FETAL LIVER, SIGNAL = 1.6; EXPRESSED IN HELA, SIGNAL = 2.6; EXPRESSED IN ADULT LIVER, SIGNAL = 1.3; EXPRESSED IN LUNG, SIGNAL = 1.2; EXPRESSED IN BONE MARROW, SIGNAL = 1.5
IVEESQHNDRAPELSGKI

SEQ ID NO: 32505 - protein, 30 aa, Homo sapiens
  MAP TO AL132777.2; EXPRESSED IN ADULT LIVER, SIGNAL = 2.3; EXPRESSED IN PLACENTA, SIGNAL = 1.6; EXPRESSED IN BRAIN, SIGNAL = 2.1; EXPRESSED IN LUNG, SIGNAL = 1.7; EXPRESSED IN HEART, SIGNAL = 2.2; EXPRESSED IN FETAL LIVER, SIGNAL =   2; SWISSPROT HIT: P28282, EVALUE 8.70e+00
SQVRRTSSKRMGWKAPRKGRRRTEKWRGAR

SEQ ID NO: 32506 - protein, 120 aa, Homo sapiens
  MAP TO AL132777.2; EXPRESSED IN ADULT LIVER, SIGNAL = 2.3; EXPRESSED IN PLACENTA, SIGNAL = 1.6; EXPRESSED IN BRAIN, SIGNAL = 2.1; EXPRESSED IN LUNG, SIGNAL = 1.7; EXPRESSED IN HEART, SIGNAL = 2.2; EXPRESSED IN FETAL LIVER, SIGNAL =   2; SWISSPROT HIT: Q9UIU6, EVALUE 8.00e-67
ILESHSFESANHPLLQQLWYKARYTEAERARGRPLGAVDKYRLRRKFPLPRTIWDGEETVYCFKEKSRNALKELYKQNRYPSPAEKRHLAKITGLSLTQVSNWFKNRRQRDRNPSETQSK

SEQ ID NO: 32507 - protein, 285 aa, Homo sapiens
  MAP TO AL132777.2; EXPRESSED IN ADULT LIVER, SIGNAL = 2.3; EXPRESSED IN PLACENTA, SIGNAL = 1.6; EXPRESSED IN BRAIN, SIGNAL = 2.1; EXPRESSED IN LUNG, SIGNAL = 1.7; EXPRESSED IN HEART, SIGNAL = 2.2; EXPRESSED IN FETAL LIVER, SIGNAL =   2; SWISSPROT HIT: P06914, EVALUE 6.20e-01
RAGGAPRSGGGRGGRAEPPGSSPFSPGAGGRRDRCRQGERRGRGSGGGGGRSGGGSGTTPLGTSGQAPPRRRRRRADPAGLLARPRRLRVRGTAAGGQPGPPGPVPVVPAPERPATWQREPAEGAGARGLPPGHLPRALQHPREPQLRVGQPPAAAAALVQGALHRGRASPRPAAGSRRQVPAAQEIPPAPHHLGRRGDGVLFQGEVAQRAQGALQAESLPFARREAAPGQDHRPLPHPGQQLVQEPPAARQEPLRDPVQKVSANFPPPPLPPPHPLPGFLFLQV

SEQ ID NO: 32508 - protein, 204 aa, Homo sapiens
  MAP TO AC011469.3; EXPRESSED IN BRAIN, SIGNAL = 1.3; EXPRESSED IN ADULT LIVER, SIGNAL = 1.7; EXPRESSED IN HELA, SIGNAL = 0.95; EXPRESSED IN LUNG, SIGNAL = 1.5; EXPRESSED IN BONE MARROW, SIGNAL = 1.4; EXPRESSED IN FETAL LIVER, SIGNAL = 1.4; SWISSPROT HIT: P21817, EVALUE 1.00e-104
CMDILELSERLDLQRFHSHTLRLYRAVCALGNNRVAHALCSHVDQAQLLHALEDAHLPGPLRAGYYDLLISIHLESACRSRRSMLSEYIVPLTPETRAITLFPPGRSTENGHPRHGLPGVGVTTSLRPPHHFSPPCFVAALPAAGAAEAPARLSPAIPLEALRDKALRMLGEAVRDGGQHARDPVGGSVEFQFVPVLKLVSTLL

SEQ ID NO: 32509 - protein, 261 aa, Homo sapiens
  MAP TO AC007220.1; EXPRESSED IN HELA, SIGNAL = 1.6; EXPRESSED IN LUNG, SIGNAL = 1.4; EXPRESSED IN PLACENTA, SIGNAL = 1.8; EXPRESSED IN ADULT LIVER, SIGNAL = 1.2; SWISSPROT HIT: Q9PW70, EVALUE 1.00e-14
GRVRRERRPPELSGRRTPARPRSAPAHRFVSPAAHPRTLWPTPPAGPFCRMVAHNQVAADNAVSTAAEPRRRPEPSSSSSSSPAAPARPRPCPAVPAPAPGDTHFRTFRSHADYRRITRASALLDACGFYWGPLSVHGAHERLRAEPVGTFLVRDSRQRNCFFALSVKMASGPTSIRVHFQAGRFHLDGSRESFDCLFELLEHYVAAPRRMLGAPLRQRRVRPLQELCRQRIVATVGRENLARIPLNPVLRDYLSSFPFQI

SEQ ID NO: 32510 - protein, 104 aa, Homo sapiens
  MAP TO AC007220.1; EXPRESSED IN HELA, SIGNAL = 1.6; EXPRESSED IN LUNG, SIGNAL = 1.4; EXPRESSED IN PLACENTA, SIGNAL = 1.8; EXPRESSED IN ADULT LIVER, SIGNAL = 1.2
CSLHSSRAPTAARTFLLFLLLARGPRAPAAVPRGPGPGPRRHALPHIPFARRLPAHHARQRAPGRLRILLGAPERARGARAAARRARGHLPGARQPPAELLFRP

SEQ ID NO: 32511 - protein, 150 aa, Homo sapiens; identical to SEQ ID NO: 31976
  MAP TO AL035252.5; EXPRESSED IN HEART, SIGNAL = 1.7; EXPRESSED IN FETAL LIVER, SIGNAL = 0.93; EXPRESSED IN LUNG, SIGNAL = 1.3; EXPRESSED IN ADULT LIVER, SIGNAL = 1.8; EXPRESSED IN PLACENTA, SIGNAL = 1.9; SWISSPROT HIT: P13993, EVALUE 2.00e-15

SEQ ID NO: 32512 - protein, 67 aa, Homo sapiens
  MAP TO AL035252.5; EXPRESSED IN HEART, SIGNAL = 1.7; EXPRESSED IN FETAL LIVER, SIGNAL = 0.93; EXPRESSED IN LUNG, SIGNAL = 1.3; EXPRESSED IN ADULT LIVER, SIGNAL = 1.8; EXPRESSED IN PLACENTA, SIGNAL = 1.9; SWISSPROT HIT: Q06793, EVALUE 1.30e-01
IPHPSGGRPSEGQPSGGTPLRWIPLRWILLRWMPLRWIPLRWMPLRWIPLRWIPLRWMPLRWIPLRW

SEQ ID NO: 32513 - protein, 109 aa, Homo sapiens
  MAP TO AL035252.5; EXPRESSED IN HEART, SIGNAL = 1.7; EXPRESSED IN FETAL LIVER, SIGNAL = 0.93; EXPRESSED IN LUNG, SIGNAL = 1.3; EXPRESSED IN ADULT LIVER, SIGNAL = 1.8; EXPRESSED IN PLACENTA, SIGNAL = 1.9; SWISSPROT HIT: P22674, EVALUE 5.00e+00
PSGGFPSGLCPSGGFPSGGVPSGGVPSGGHSSGGFPSGVCPSGGRPSGGHSSGGHPSGEIPLRWMPLTWDSPWVCAQSPESPELPVGMRPWSPTTVTCRMMLVLVPPPL

SEQ ID NO: 32514 - protein, 74 aa, Homo sapiens
  MAP TO AL133372.2; EXPRESSED IN LUNG, SIGNAL = 1.7; EXPRESSED IN FETAL LIVER, SIGNAL = 1.8; EXPRESSED IN ADULT LIVER, SIGNAL = 1.9; EXPRESSED IN PLACENTA, SIGNAL = 3.7; EXPRESSED IN BRAIN, SIGNAL = 2.4; SWISSPROT HIT: P27401, EVALUE 2.00e-06
IAEISANIKDLKDTGVVIPTISPFNSPIWPVQKTDGSWIMTMDYLKCNQVVTPIAAAVPDVVLLLEQINTSLGT

SEQ ID NO: 32515 - protein, 152 aa, Homo sapiens
  MAP TO AL020998.1; EXPRESSED IN PLACENTA, SIGNAL = 2.5; EXPRESSED IN ADULT LIVER, SIGNAL = 2.8; EXPRESSED IN BRAIN, SIGNAL = 2.5; EXPRESSED IN FETAL LIVER, SIGNAL = 2.5; EXPRESSED IN LUNG, SIGNAL = 2.7; EXPRESSED IN HEART, SIGNAL = 2.7; SWISSPROT HIT: P45597, EVALUE 9.00e+00
PSHHPSAFETETSSDWDPPAESQERASPSRPATPAPVLGKALVKGLHDSQRLQWEVSFELGTPGPERGGAQDADLWSETFHHLAARAIIRDFEQLAEREGEIEQGERHGTAPLPRTASGGQPRSTAAPPSPPAPGDPLSPAWSAHLLPGSYP

SEQ ID NO: 32516 - protein, 476 aa, Homo sapiens
  MAP TO AC016629.5; EXPRESSED IN FETAL LIVER, SIGNAL = 1.1; EXPRESSED IN LUNG, SIGNAL = 1.3; EXPRESSED IN ADULT LIVER, SIGNAL = 1.3; EXPRESSED IN PLACENTA, SIGNAL = 1.5; EXPRESSED IN BRAIN, SIGNAL = 1.4; EXPRESSED IN HELA, SIGNAL = 0.84; SWISSPROT HIT: P28698, EVALUE 0.00e+00
FALQLGSISAGPGSVSPHLHVPWDLGMAGLSGQIQSPSREGGFAHALLLPSDLRSEQDPTDEDPCRGVGPALITTRWRSPRGRSRGRPSTGGGVVRGGRCDVCGKVFSQRSNLLRHQKIHTGERPFVCSECGRSFSRSSHLLRHQLTHTEERPFVCGDCGQGFVRSARLEEHRRVHTGEQPFRCAECGQSFRQRSNLLQHQRIHGDPPGPGAKPPAPPGAPEPPGPFPCSECRESFARRAVLLEHQAVHTGDKSFGCVECGERFGRRSVLLQHRRVHSGERPFACAECGQSFRQRSNLTQHRRIHTGERPFACAECGKAFRQRPTLTQHLRVHTGEKPFACPECGQRFSQRLKLTRHQRTHTGEKPYHCGECGLGFTQVSRLTEHQRIHTGERPFACPECGQSFRQHANLTQHRRIHTGERPYACPECGKAFRQRPTLTQHLRTHRREKPFACQDCGRRFHQSTKLIQHQRVHSAE

SEQ ID NO: 32517 - protein, 18 aa, Homo sapiens
  MAP TO AC008762.5; EXPRESSED IN ADULT LIVER, SIGNAL = 1.1; EXPRESSED IN BRAIN, SIGNAL = 1.3; EXPRESSED IN HEART, SIGNAL = 1.7; EXPRESSED IN HELA, SIGNAL = 0.81
SSGNPRPVRLPRGPRSLS

SEQ ID NO: 32518 - protein, 271 aa, Homo sapiens
  MAP TO AC008762.5; EXPRESSED IN ADULT LIVER, SIGNAL = 1.1; EXPRESSED IN BRAIN, SIGNAL = 1.3; EXPRESSED IN HEART, SIGNAL = 1.7; EXPRESSED IN HELA, SIGNAL = 0.81; SWISSPROT HIT: P16053, EVALUE 3.00e-07
PELSTFPKKPAQPEFNVYPKKPPQPQVGGLPKKSVPQPEFSEAAQTPLWKPQSSEPKRDSSAFPKKASQPPLSDFPKKPPQPELGDLTRTSSEPEVSVLPKRPRPAEFKALSKKPPQPELGGLPRTSSEPEFNSLPRKLLQPERRGPPRKFSQPEPSAVLKRHPQPEFFGDLPRKPPLPSSASESSLPAAVAGFSSRHPLSPGFGAAGTPRWRSGGLVHSGGARPGLRPSHPPRRRPLPPASSLGHPPAKPPLPPGPVDMQSFRRPSAASI

SEQ ID NO: 32519 - protein, 197 aa, Homo sapiens
  MAP TO AC006385.3; EXPRESSED IN ADULT LIVER, SIGNAL = 1.6; EXPRESSED IN PLACENTA, SIGNAL = 1.7; EXPRESSED IN BRAIN, SIGNAL = 1.6; EXPRESSED IN BONE MARROW, SIGNAL = 1.7; EXPRESSED IN LUNG, SIGNAL =   2; EXPRESSED IN HEART, SIGNAL =   2; EXPRESSED IN FETAL LIVER, SIGNAL = 1.6; SWISSPROT HIT: O95863, EVALUE 2.00e-67
MPRSFLVRKLPDPDRKPNYSKLPDSNPEFTFQQQPYHQAHLNSTALLPTLIWDAFLALQAQPTARASLQLRLPQESFKAAELTSLSDEDSGKGSQSPSPRSQPSSSFSSTSASSLEAEADTTFPGLGQVCKQLAQVSEAKDSQFQKAFNCQYCNKECLSLGALKKHIRSHTLPFACETCGKAFSRPWLLRGHVRTHT

SEQ ID NO: 32520 - protein, 138 aa, Homo sapiens
  MAP TO AC006385.3; EXPRESSED IN ADULT LIVER, SIGNAL = 1.6; EXPRESSED IN PLACENTA, SIGNAL = 1.7; EXPRESSED IN BRAIN, SIGNAL = 1.6; EXPRESSED IN BONE MARROW, SIGNAL = 1.7; EXPRESSED IN LUNG, SIGNAL =   2; EXPRESSED IN HEART, SIGNAL =   2; EXPRESSED IN FETAL LIVER, SIGNAL = 1.6; SWISSPROT HIT: P25054, EVALUE 2.00e-01
LPWRRRPIPPSQAWAKCASSWPRSLRPRIPSFKKPSTANTAIRNASAWVPSRNTSEATRCPSPAKPAGRPSPDPGCCGAMSGPTLVRSPSPVPTAAVPSPTAPTCGPTSRPTWTSRSTSARRALEPSPEWPCSTSTKS

SEQ ID NO: 32521 - protein, 222 aa, Homo sapiens
  MAP TO AC010389.6; EXPRESSED IN ADULT LIVER, SIGNAL = 3.8; EXPRESSED IN PLACENTA, SIGNAL = 4.5; EXPRESSED IN HELA, SIGNAL = 4.5; EXPRESSED IN LUNG, SIGNAL = 3.7; EXPRESSED IN HEART, SIGNAL = 3.7; EXPRESSED IN BONE MARROW, SIGNAL = 4.2; EXPRESSED IN FETAL LIVER, SIGNAL = 3.7; SWISSPROT HIT: P21414, EVALUE 3.00e-21
TSAQLAELVALTQALELGKGKRINVYTDSKYAYLILHAHAAIWKEREFLTSGGTPIKYHKETMELLHAVQKPKEVVVLHCHQKGKERGEQQHKQLAEAAEWKERKRQKEKERERKQQRQREGDRERKRQRQRSQRERQRQEERERDKEVKEKERERSSKEKTVYPVPLKARVNFCLPSHDIFFLCGTSTDICLSDSLQEITKSILTLQSQIDFLAAVTLQIC

SEQ ID NO: 32522 - protein, 91 aa, Homo sapiens
  MAP TO AC003693.1; EXPRESSED IN ADULT LIVER, SIGNAL = 1.5; EXPRESSED IN BRAIN, SIGNAL =   1; EXPRESSED IN HELA, SIGNAL = 1.6; EXPRESSED IN BONE MARROW, SIGNAL = 1.3
GGGDNDHGDRADGGVCDDGGGGGDGGGHEGSWGGDGITVDEGGDDSDGDGGGNDDEDDDDSGANGSGGGSDCGVVDGISADKGGDDDDGGG

SEQ ID NO: 32523 - protein, 62 aa, Homo sapiens
  MAP TO AC019162.3; EXPRESSED IN HEART, SIGNAL = 4.1; EXPRESSED IN BONE MARROW, SIGNAL = 5.2; EXPRESSED IN LUNG, SIGNAL = 4.5; EXPRESSED IN FETAL LIVER, SIGNAL =   5; EXPRESSED IN ADULT LIVER, SIGNAL = 4.6; EXPRESSED IN PLACENTA, SIGNAL = 4.1; EXPRESSED IN BRAIN, SIGNAL = 4.9; SWISSPROT HIT: Q27685, EVALUE 1.20e+00
TLRIRPLCKQQRDLGISFASHIASGKGANIIQLEEKQYQGMTLNGIPVTRQKTGRGDTFRCA

SEQ ID NO: 32524 - protein, 153 aa, Homo sapiens
  MAP TO AL022727.1; EXPRESSED IN ADULT LIVER, SIGNAL = 1.3; EXPRESSED IN BRAIN, SIGNAL = 1.2; EXPRESSED IN HELA, SIGNAL = 1.9; EXPRESSED IN FETAL LIVER, SIGNAL = 1.3; SWISSPROT HIT: O76001, EVALUE 1.00e-78
EMNDDGKVNASSEGYFILVGFSNWPHLEVVIFVVVLIFYLMTLIGNLFIIILSYLDSHLHTPMYFFLSNLSFLDLCYTTSSIPQLLVNLWGPEKTISYAGCMIQLYFVLALGTTECVLLVVMSYDRYAAVCRPLHYTVLMHPRFCHLLAVASW

SEQ ID NO: 32525 - protein, 91 aa, Homo sapiens
  MAP TO AL022727.1; EXPRESSED IN ADULT LIVER, SIGNAL = 1.3; EXPRESSED IN BRAIN, SIGNAL = 1.2; EXPRESSED IN HELA, SIGNAL = 1.9; EXPRESSED IN FETAL LIVER, SIGNAL = 1.3; SWISSPROT HIT: O73944, EVALUE 5.30e-01
GCLDLLLDDTDRKPVHHHPVIPGLPSAHTNVLLPFKPLISGSLLHHQLYPSVAGQSLGPGKDHLLCWLHDSTLLCSRTGNHRVCPTGGDVL

SEQ ID NO: 32526 - protein, 91 aa, Homo sapiens
  MAP TO AC004923.2; EXPRESSED IN HELA, SIGNAL = 4.1; EXPRESSED IN ADULT LIVER, SIGNAL = 1.8; EXPRESSED IN HEART, SIGNAL = 1.6; EXPRESSED IN FETAL LIVER, SIGNAL = 1.4; EXPRESSED IN LUNG, SIGNAL =   2; SWISSPROT HIT: P33297, EVALUE 7.10e-01
MLKLYNGLSEGEAVGLPAGPDPLDPTDLNGAHFDPEVYLDKLPRESPLAQLMDSETDMVQQIRALDSDMQTLVYENYDKFIPATEMTNSIK

SEQ ID NO: 32527 - protein, 265 aa, Homo sapiens
  MAP TO AL121796.1; EXPRESSED IN BRAIN, SIGNAL = 1.3; EXPRESSED IN ADULT LIVER, SIGNAL = 1.2; EXPRESSED IN HEART, SIGNAL = 1.3; EXPRESSED IN BONE MARROW, SIGNAL = 1.2; EXPRESSED IN LUNG, SIGNAL =   1; SWISSPROT HIT: Q60483, EVALUE 9.90e-01
CAVDTAWGRRHSLAVTMAQLQCRVTVQWRPRGAAVCHSLAIATAVLQCHVTVQWTPRAAAVCHSLAVATAVLQCHVTVQWTPRGAAVCHSLAVTMAQLQCRVTVQWTPCGAAVCHSLAVTMAQLQCRMTVQWTPCGAAVCHSLAIATAVLQCRVTVQWTPRAAAVCHSLAVTMAQLQCRMTVQWTPCGAAVCHSLAIAMAVLQCRVTVQWTPCAAAVCHSLAVTTAVLQCRVTVQWTPRGAAVCHSLAIATAELQCHVTMQLDTA

SEQ ID NO: 32528 - protein, 93 aa, Homo sapiens
  MAP TO AL121796.1; EXPRESSED IN BRAIN, SIGNAL = 1.3; EXPRESSED IN ADULT LIVER, SIGNAL = 1.2; EXPRESSED IN HEART, SIGNAL = 1.3; EXPRESSED IN BONE MARROW, SIGNAL = 1.2; EXPRESSED IN LUNG, SIGNAL =   1
TVWGRRVSQSCHCHGSAAMSCDCAVDTVCGRRVSQSCCHHSSAAMSCDCAVDTAWGRRVSQSCHCHGRAAMSRDHAARHRVTVQLDTTWTAGG

SEQ ID NO: 32529 - protein, 36 aa, Homo sapiens
  MAP TO AC011811.36; EXPRESSED IN HEART, SIGNAL = 1.8; EXPRESSED IN BONE MARROW, SIGNAL = 1.5; EXPRESSED IN ADULT LIVER, SIGNAL = 2.1; EXPRESSED IN BRAIN, SIGNAL = 1.4
WHSQGTPWATWMTAGLRTAQQESPKVRSHSQQMSWQ

SEQ ID NO: 32530 - protein, 185 aa, Homo sapiens
  MAP TO AC000353.27; EXPRESSED IN LUNG, SIGNAL =   1; EXPRESSED IN FETAL LIVER, SIGNAL = 1.1; EXPRESSED IN ADULT LIVER, SIGNAL = 1.2; EXPRESSED IN HELA, SIGNAL = 0.67; EXPRESSED IN BONE MARROW, SIGNAL =   1; SWISSPROT HIT: O70594, EVALUE 9.00e-08
LHKAGGTGPQVRPMAMAFTDLLDALGSMGRFQLNHTALLLLPCGLLACHNFLQNFTAAVPPHHCRGPANHTEASTNDSGAWLRATIPLDQLGAPEPCRRFTKPQWALLSPNSSIPGAATEGCKDGWVYNRSVFPSTIVMEVRRGWVCGGAAAEAQSEAPMSSLQWDLVCEARTLRDLAQSVYIAG

SEQ ID NO: 32531 - protein, 166 aa, Homo sapiens
  MAP TO AL135998.2; EXPRESSED IN BRAIN, SIGNAL = 1.6; EXPRESSED IN ADULT LIVER, SIGNAL = 1.5; EXPRESSED IN PLACENTA, SIGNAL = 1.8; EXPRESSED IN LUNG, SIGNAL = 1.8; EXPRESSED IN BONE MARROW, SIGNAL = 1.7; EXPRESSED IN FETAL LIVER, SIGNAL = 1.3; SWISSPROT HIT: Q9UM01, EVALUE 9.00e-83
MVDSTEYEVASQPEVETSPLGDGASPGPEQVKLKKEISLLNGVCLIVGNMIGSGIFVSPKGVLIYSASFGLSLVIWAVGGLFSVFGALCYAELGTTIKKSGASYAYILEAFGGFLAFIRLWTSLLIIEPTSQAIIAITFANYMVQPLFPSCFAPYAASRLLAAACI

SEQ ID NO: 32532 - protein, 155 aa, Homo sapiens
  MAP TO AC011382.1; EXPRESSED IN LUNG, SIGNAL = 1.6; EXPRESSED IN ADULT LIVER, SIGNAL = 1.4; EXPRESSED IN BRAIN, SIGNAL = 1.4; EXPRESSED IN BONE MARROW, SIGNAL = 1.2; SWISSPROT HIT: Q12766, EVALUE 7.00e-77
SVSCPELLDQHYTVDMTETEHSIQHPVTKTATRRIVHAGLQPNPGDPSAGHHSLALCPELAPYATILASIVDSKPNGVRQRPIAFDNATHYYLYNRLMDFLTSREIVNRQIHDIVQSCQPGEVVIRDTLYRLGVAQIKTETEEEGEEEEVAAVAE

SEQ ID NO: 32533 - protein, 46 aa, Homo sapiens
  MAP TO AC004660.1; EXPRESSED IN PLACENTA, SIGNAL = 1.8; EXPRESSED IN BRAIN, SIGNAL = 3.9; EXPRESSED IN HELA, SIGNAL = 2.1; EXPRESSED IN ADULT LIVER, SIGNAL = 2.3; EXPRESSED IN HEART, SIGNAL = 2.4; EXPRESSED IN FETAL LIVER, SIGNAL = 1.7; EXPRESSED IN LUNG, SIGNAL = 2.4; EXPRESSED IN BONE MARROW, SIGNAL = 2.1
MSSTRSSRHCCLTSALSPTPGSTCRRGSASTSRSMKSGCRRTRSGR

SEQ ID NO: 32534 - protein, 286 aa, Homo sapiens
  MAP TO AL137818.2; EXPRESSED IN ADULT LIVER, SIGNAL =   2; EXPRESSED IN BRAIN, SIGNAL = 1.8; EXPRESSED IN HELA, SIGNAL = 2.1; EXPRESSED IN PLACENTA, SIGNAL = 1.7; EXPRESSED IN BONE MARROW, SIGNAL = 1.8; EXPRESSED IN LUNG, SIGNAL = 1.8; EXPRESSED IN FETAL LIVER, SIGNAL = 1.8; SWISSPROT HIT: P97739, EVALUE 2.10e-01
KTQMQHGLISIAARTVITHLVNHLGHYPMSGGPAMLTSQVCENHDNHYSESTELSPELFESPNIQFFVLNNTTLVSCIQIRSEENMPGGGLSAGLASANSNVRIIVRDLSGKYSWDSAILYGPPPVSGLSEPTSFMLSLSHQEKPEEPPTSNECLEDITVKDGLSLQFKRFRETVPTWDTIRDEEDVLDELLQYLGVTSPECLQRTGISLNIPAPQPVCISEKQENDVINAILKQHTEEKEFVEKHFNDLNMKAVEQDEPIPQKPQSAFYYCRLLLSILGMNSWDK

SEQ ID NO: 32535 - protein, 57 aa, Homo sapiens
  MAP TO U07000.1; EXPRESSED IN ADULT LIVER, SIGNAL = 3.2; EXPRESSED IN HELA, SIGNAL = 0.89; EXPRESSED IN LUNG, SIGNAL = 3.4; EXPRESSED IN HEART, SIGNAL = 4.4; EXPRESSED IN BONE MARROW, SIGNAL = 3.5; SWISSPROT HIT: Q9NRQ2, EVALUE 9.50e-01
RCTAVGPAPKGLPAHLPADVDPPRQPCVLPASHHQASLCCAVLQPPRPGYSKPVTVR

SEQ ID NO: 32536 - protein, 148 aa, Homo sapiens
  MAP TO U07000.1; EXPRESSED IN ADULT LIVER, SIGNAL = 3.2; EXPRESSED IN HELA, SIGNAL = 0.89; EXPRESSED IN LUNG, SIGNAL = 3.4; EXPRESSED IN HEART, SIGNAL = 4.4; EXPRESSED IN BONE MARROW, SIGNAL = 3.5; SWISSPROT HIT: Q9UKB7, EVALUE 2.00e-89
CCGHFSPLKIWDLNSGQLMTHLDRDFPPRAGVLDVIYESPFALLSCGYDTYVRYWDCRTSVRKCVMEWEEPHNSTLYCLQTDGNHLLATGSSFYSVVRLWDRHQRACPHTFPLTSTRLGSPVYCLHLTTKHLYAALSYNLHVLDIQNP

SEQ ID NO: 32537 - protein, 17 aa, Homo sapiens
  MAP TO Z68328.1; EXPRESSED IN ADULT LIVER, SIGNAL = 1.4; EXPRESSED IN HELA, SIGNAL = 1.1; EXPRESSED IN BONE MARROW, SIGNAL = 1.2; EXPRESSED IN LUNG, SIGNAL = 1.4
WKISQDMLNKAEDLLSC

SEQ ID NO: 32538 - protein, 71 aa, Homo sapiens
  MAP TO Z95327.1; EXPRESSED IN LUNG, SIGNAL = 2.9; EXPRESSED IN PLACENTA, SIGNAL = 2.4; EXPRESSED IN BRAIN, SIGNAL = 3.9; EXPRESSED IN ADULT LIVER, SIGNAL = 2.9; EXPRESSED IN BONE MARROW, SIGNAL = 2.9; EXPRESSED IN HEART, SIGNAL = 2.3; SWISSPROT HIT: O13773, EVALUE 1.20e+00
SEQSTSNLNEKINHLEYEDQYKDNNFGEGNDGGILEDKLISNNDGSIFDDPPALSEAEVMLPEQPAHDDIR

SEQ ID NO: 32539 - protein, 71 aa, Homo sapiens
  MAP TO AP001708.1; EXPRESSED IN ADULT LIVER, SIGNAL = 2.9; EXPRESSED IN HELA, SIGNAL = 5.5; EXPRESSED IN LUNG, SIGNAL = 2.6; SWISSPROT HIT: Q02958, EVALUE 1.00e-04
FGSSSCRSLGYGSRSCYSVGCGSSGFRSLGYGGCGFPSLGYGVGFCRPTYLASRSCQSSCYRPTCGSGFYY

SEQ ID NO: 32540 - protein, 120 aa, Homo sapiens
  MAP TO AP001708.1; EXPRESSED IN ADULT LIVER, SIGNAL = 2.9; EXPRESSED IN HELA, SIGNAL = 5.5; EXPRESSED IN LUNG, SIGNAL = 2.6; SWISSPROT HIT: P49918, EVALUE 8.00e-03
CGMQTQNLLSVTQLNSHLPSTCPTTAALETSPPAPVVATCTTQPPPVAFPTPATRSTALTSALPARASWVPLSIGAVSRPAGSPPAARHPMWSPAPARPPATVPEPPCSAVPARQLTLGL

SEQ ID NO: 32541 - protein, 313 aa, Homo sapiens
  MAP TO AC011311.11; EXPRESSED IN BONE MARROW, SIGNAL = 0.88; EXPRESSED IN BRAIN, SIGNAL = 0.86; EXPRESSED IN ADULT LIVER, SIGNAL = 1.2; SWISSPROT HIT: P05997, EVALUE 2.80e-02
ARRNAGPASPCRPPPCAPLAVIASGPVPQSFVPGSGHAVGDALSALSAPLALLAPHRVRRARAGFPPPSSAPERTNPHSKRPASEALPLQNSAGPPGPTRNSGIGRERLAQPKYPHAAREEPCARCAERGPEGFPMPVTGAQQGQPGASVGLTRSPNCQGERDEGKGGAPAGWTGAYPVGSGDLRAKRQRRQDQPLSLFPSKTTAFQGREAPRGSLRGHSAPVWADAHRVAPVAFRAQAPPPPRCPSPHGGVARPSPGIRDSKSHPARLGKSRRKCATSQQARLKSRQAGRKACVPPCMRGRSSGGRLSWAFN

SEQ ID NO: 32542 - protein, 83 aa, Homo sapiens
  MAP TO AC011311.11; EXPRESSED IN BONE MARROW, SIGNAL = 0.88; EXPRESSED IN BRAIN, SIGNAL = 0.86; EXPRESSED IN ADULT LIVER, SIGNAL = 1.2; SWISSPROT HIT: P81408, EVALUE 5.30e-02
PQECRPRLSMPAAPLCSFSCHRKWSRPPELRPWVGSCCWGRPERSQRTVGPARSPPGEEGKSRLPTPLLRARAHKSPLEATCL

SEQ ID NO: 32543 - protein, 236 aa, Homo sapiens; identical to SEQ ID NO: 32437
  MAP TO AL133543.2; EXPRESSED IN BRAIN, SIGNAL = 1.2; EXPRESSED IN ADULT LIVER, SIGNAL =   2; EXPRESSED IN LUNG, SIGNAL = 1.3; EXPRESSED IN BONE MARROW, SIGNAL = 1.2; SWISSPROT HIT: P15924, EVALUE 1.00e-111

SEQ ID NO: 32544 - protein, 213 aa, Homo sapiens
  MAP TO AC010474.2; EXPRESSED IN ADULT LIVER, SIGNAL = 1.3; EXPRESSED IN LUNG, SIGNAL = 8.1; SWISSPROT HIT: P26038, EVALUE 2.00e-97
RVLEQHKLSKDQWEERIQVWHEEHRGMLREDAVLEYLKIAQDLEMYGVNYFSIKKKKGSELWLGVDALGLNIYEQHDRLTPKIGFPWSEIRSISFNDKNFVIKPIDKRAPDFVFYAPWLQINKRILALCMGNRELYMRRRKPDTIEVQQMKARAREEKHQKQMERAMLENEKKKREMAEKEKEKIEREKELMGRLKQIEEQTKKAQQELEEQT

SEQ ID NO: 32545 - protein, 506 aa, Homo sapiens
  MAP TO AL132826.15; EXPRESSED IN BRAIN, SIGNAL = 1.4; EXPRESSED IN ADULT LIVER, SIGNAL = 1.5; EXPRESSED IN HELA, SIGNAL = 1.2; EXPRESSED IN LUNG, SIGNAL = 1.7; EXPRESSED IN BONE MARROW, SIGNAL = 1.4; EXPRESSED IN FETAL LIVER, SIGNAL = 1.2; SWISSPROT HIT: O94991, EVALUE 2.00e-16
SIEEGAFRDSNYLRLLFLSRNHLSTIPWGLPRTIEELRLDDNRISTISSPSLQGLTSLKRLVLDGNLLNNHGLGDKVFFNLVNLTELSLVRNSLTAAPVNLPGTNLRKLYLQDNHINRVPPNAFSYLRQLYRLDMSNNNLSNLPQGIFDDLDNITQLILRNNPWYCGCKMKWVRDWLQSLPVKVNVRGLMCQAPEKVRGMAIKDLNAELFDCKDSGIVSTIQITTAIPNTVYPAQGQWPAPVTKQPDIKNPKLTKDHQTTGSPSRKTITITVKSVTSDTIHISWKLALPMTALRLSWLKLGHSPAFGSITETIVTGERSEYLVTALEPDSPYKVCMVPMETSNLYLFDETPVCIETETAPLRMYNPTTTLNREQEKEPYKNPNLPLAAIIGGAVALVTIALLALVCWYVHRNGSLFSRNCAYSKGRRRKDDYAEAGTKKDNSILEIRETSFQMLPISNEPISKEEFVIHTIFPPNGMNLYKNNHSESSSNRSYRDSGIPDSDHSHS

SEQ ID NO: 32546 - protein, 578 aa, Homo sapiens
  MAP TO AC005041.2; EXPRESSED IN LUNG, SIGNAL = 1.2; EXPRESSED IN HELA, SIGNAL = 1.6; EXPRESSED IN ADULT LIVER, SIGNAL = 1.3; SWISSPROT HIT: Q13724, EVALUE 0.00e+00
YNVFWTSNPGLPLLTEMVKSRLNSWFQHRPPGAPPERYLGLPGSLKWEDRGPSGQGQGQFLIQQVTLKIPISIEFVFESGSAQAGGNQALPRLAGSLLTQALESHAEGFRERFEKTFQLKEKGLSSGEQVLGQAALSGLLGGIGYFYGQGLVLPDIGVEGSEQKVDPALFPPVPLFTAVPSRSFFPRGFLWDEGFHQLVVQRWDPSLTREALGHWLGLLNADGWIGREQILGDEARARVPPEFLVQRAVHANPPTLLLPVAHMLEVGDPDDLAFLRKALPRLHAWFSWLHQSQAGPLPLSYRWRGRDPALPTLLNPKTLPSGLDDYPRASHPSVTERHLDLRCWVALGARVLTRLAEHLGEAEVAAELGPLAASLEAAESLDELHWAPELGVFADFGNHTKAVQLKPRPPQGLVRVVGRPQPQLQYVDALGYVSLFPLLLRLLDPTSSRLGPLLDILADSRHLWSPFGLRSLAASSSFYGQRNSEHDPPYWRGAVWLNVNYLALGALHHYGHLEGPHQARAAKLHGELRANVVGNVWRQYQATGFLWEQYSDRDGRGMGCRPFHGWTSLVLLAMAEDY

SEQ ID NO: 32547 - protein, 93 aa, Homo sapiens
  MAP TO AC011406.1; EXPRESSED IN FETAL LIVER, SIGNAL = 1.9; EXPRESSED IN ADULT LIVER, SIGNAL = 1.8; EXPRESSED IN HELA, SIGNAL = 1.7; SWISSPROT HIT: Q12766, EVALUE 1.00e-37
MAEQCLAVEALAEEVGALTQSGAVQEIATSEILSQDVLLEDASLEVGESHQPYQTSLVIEETLVNGSPDLPTGSLAVPHPQVGESVSVVTVMR

SEQ ID NO: 32548 - protein, 30 aa, Homo sapiens
  MAP TO AC011406.1; EXPRESSED IN FETAL LIVER, SIGNAL = 1.9; EXPRESSED IN ADULT LIVER, SIGNAL = 1.8; EXPRESSED IN HELA, SIGNAL = 1.7
TSQVSARSSHAQIISSSPRAACRRTGAALS

SEQ ID NO: 32549 - protein, 142 aa, Homo sapiens
  MAP TO AC002472.3; EXPRESSED IN FETAL LIVER, SIGNAL = 1.3; EXPRESSED IN BRAIN, SIGNAL = 1.7; EXPRESSED IN HELA, SIGNAL = 0.42; EXPRESSED IN ADULT LIVER, SIGNAL = 1.5; EXPRESSED IN HEART, SIGNAL =   2; EXPRESSED IN BONE MARROW, SIGNAL = 1.8; SWISSPROT HIT: O43246, EVALUE 6.00e-54
MNTVLLSLLFSLPRIVYAMAADGLFFQVFAHVHPRTQVPVAGTLAFGLLTAFLALLLDLESLVQFLSLGTLLAYTFVATSIIVLRFQKSSPPSSPGPASPGPLTKQQSSFSDHLQLVGTVHASVPEPGELKPALRPYLGFLD

SEQ ID NO: 32550 - protein, 23 aa, Homo sapiens
  MAP TO AC002472.3; EXPRESSED IN FETAL LIVER, SIGNAL = 1.3; EXPRESSED IN BRAIN, SIGNAL = 1.7; EXPRESSED IN HELA, SIGNAL = 0.42; EXPRESSED IN ADULT LIVER, SIGNAL = 1.5; EXPRESSED IN HEART, SIGNAL =   2; EXPRESSED IN BONE MARROW, SIGNAL = 1.8; SWISSPROT HIT: O43246, EVALUE 2.00e-06
VMFLLSLLVLGAHQQQYREDLFQ

SEQ ID NO: 32551 - protein, 147 aa, Homo sapiens
  MAP TO AC002472.3; EXPRESSED IN FETAL LIVER, SIGNAL = 1.3; EXPRESSED IN BRAIN, SIGNAL = 1.7; EXPRESSED IN HELA, SIGNAL = 0.42; EXPRESSED IN ADULT LIVER, SIGNAL = 1.5; EXPRESSED IN HEART, SIGNAL =   2; EXPRESSED IN BONE MARROW, SIGNAL = 1.8; SWISSPROT HIT: P17931, EVALUE 2.00e-03
PPAEAPGGLLRHADPPHSLCYSHEHRPAQPPLLPATHCLCHGRRWALLPGVCPCAPPDTGACGGHPGVRAPHGLPGTAAGPGVAGSVPVPWHTPGLHIRGHQYHCAALPEVFPAQLPRPSQPWPPDQAAELLLRPPTAGGHCTRLRP

SEQ ID NO: 32552 - protein, 172 aa, Homo sapiens
  MAP TO AL163300.2; EXPRESSED IN ADULT LIVER, SIGNAL = 1.7; EXPRESSED IN HELA, SIGNAL = 1.1; EXPRESSED IN BRAIN, SIGNAL = 0.96; EXPRESSED IN BONE MARROW, SIGNAL = 0.97; EXPRESSED IN LUNG, SIGNAL = 1.4; SWISSPROT HIT: P08131, EVALUE 5.00e-03
VDDCPESCCEPPCCAASCCAPAPCLTLVCTPVSCVSSPCCQAACEPSSCTPLCCQQSSCQPACCTSSPSQQSCCVPVCCKPVCCKPVCCVPVCSGASSLCCQQSSCQPACCTSSCCRPSSSVSLLCHPVCRPTCCMPVPSCCAPAFSCQPSCCHPASCVSLLCRRVCSHLAC

SEQ ID NO: 32553 - protein, 42 aa, Homo sapiens
  MAP TO AL163300.2; EXPRESSED IN ADULT LIVER, SIGNAL = 1.7; EXPRESSED IN HELA, SIGNAL = 1.1; EXPRESSED IN BRAIN, SIGNAL = 0.96; EXPRESSED IN BONE MARROW, SIGNAL = 0.97; EXPRESSED IN LUNG, SIGNAL = 1.4
GRLPGELLRAPLLRRQLLCPGPLPDPGLHPSELCVQPLLPGS

SEQ ID NO: 32554 - protein, 176 aa, Homo sapiens
  MAP TO Z84488.1; EXPRESSED IN BRAIN, SIGNAL = 1.3; EXPRESSED IN HEART, SIGNAL = 1.7; EXPRESSED IN LUNG, SIGNAL = 2.4; EXPRESSED IN ADULT LIVER, SIGNAL = 1.7; EXPRESSED IN HELA, SIGNAL = 0.97; SWISSPROT HIT: Q9ZD36, EVALUE 2.10e+00
KRQTEEAIDRIFAISQQQQQQSKSKKNRRAGKRYKFVDAVPDIFAQIEVNEKKIRQKAQILAQKELPIDEDEEMKDLLDFADVTYEKHKNGGLIKGRFGQARMVTTTHSRAPSLSASYTRLFLILNIAIFFVMLAMQLTYFQRAQSLHGQRCLYAVLLIDSCILLWLYSSCSQSQC

SEQ ID NO: 32555 - protein, 242 aa, Homo sapiens
  MAP TO AL117352.3; EXPRESSED IN PLACENTA, SIGNAL =   2; EXPRESSED IN BRAIN, SIGNAL = 3.1; EXPRESSED IN HELA, SIGNAL = 1.8; EXPRESSED IN ADULT LIVER, SIGNAL = 2.5; EXPRESSED IN LUNG, SIGNAL = 2.8; EXPRESSED IN FETAL LIVER, SIGNAL = 2.6; SWISSPROT HIT: P54937, EVALUE 1.90e+00
KVEGCRHLLETPGQYLVYNGDLVEYDADHMAQLQRVHGFLMNDCLLVATWLPQRRGMYRYNALYSLDGLAVVNVKDNPPMKDMFKLLMFPESRIFQAENAKIKREWLEVLEDTKRALSEKRRREQEEAAAPRGPPQVTSKATNPFEDDEEEEPAVPEVEEEKVDLSMEWIQELPEDLDVCIAQRDFEGAVDLLDKLNHYLEDKPSPPPVKELRAKVEERVRQLTEVLVFELSPDRSLRGGPK

SEQ ID NO: 32556 - protein, 26 aa, Homo sapiens
  MAP TO AL022334.1; EXPRESSED IN HELA, SIGNAL = 0.6; EXPRESSED IN ADULT LIVER, SIGNAL = 1.4; EXPRESSED IN LUNG, SIGNAL = 1.4
STVTSSTSRPRSFGKARPVRGTSAPS

SEQ ID NO: 32557 - protein, 175 aa, Homo sapiens
  MAP TO AL022334.1; EXPRESSED IN HELA, SIGNAL = 0.6; EXPRESSED IN ADULT LIVER, SIGNAL = 1.4; EXPRESSED IN LUNG, SIGNAL = 1.4; SWISSPROT HIT: P10301, EVALUE 4.00e-10
DVFILVFSLDNRESFDEVKRLQKQILEVKSCLKNKTKEAAELPMVICGNKNDHGELCRQVPTTEAELLVSGDENCAYFEVSAKKNTNVDEMFYVLFSMAKLPHEMSPALHRKISVQYGDAFHPRPFCMRRVKEMDAYGMVSPFARRPSVNSDLKYIKAKVLREGQARERDKCTIQ

SEQ ID NO: 32558 - protein, 29 aa, Homo sapiens
  MAP TO AC004687.1; EXPRESSED IN ADULT LIVER, SIGNAL = 2.4; EXPRESSED IN HELA, SIGNAL = 3.8; EXPRESSED IN FETAL LIVER, SIGNAL = 2.4
TLQPTSQQQWAPGLWTTGPHTGEGWPPRN

SEQ ID NO: 32559 - protein, 573 aa, Homo sapiens
  MAP TO AC003682.1; EXPRESSED IN BRAIN, SIGNAL =   2; EXPRESSED IN HEART, SIGNAL = 2.1; EXPRESSED IN FETAL LIVER, SIGNAL = 2.4; EXPRESSED IN ADULT LIVER, SIGNAL = 2.2; EXPRESSED IN PLACENTA, SIGNAL = 2.1; SWISSPROT HIT: P52740, EVALUE 0.00e+00
CLHGIEAEEAPSEQTLSAQGVSQARTPKLGPSIPNAHSCEMCILVMKDILYLSEHQGTLPWQKPYTSVASGKWFSFGSNLQQHQNQDSGEKHIRKEESSALLLNSCKIPLSDNLFPCKDVEKDFPTILGLLQHQTTHSRQEYAHRSRETFQQRRYKCEQVFNEKVHVTEHQRVHTGEKAYKRREYGKSLNSKYLFVEHQRTHNAEKPYVCNICGKSFLHKQTLVGHQQRIHTRERSYVCIECGKSLSSKYSLVEHQRTHNGEKPYVCNVCGKSFRHKQTFVGHQQRIHTGERPYVCMECGKSFIHSYDRIRHQRVHTGEGAYQCSECGKSFIYKQSLLDHHRIHTGERPYECKECGKAFIHKKRLLEHQRIHTGEKPYVCIICGKSFIRSSDYMRHQRIHTGERAYECSDCGKAFISKQTLLKHHKIHTRERPYECSECGKGFYLEVKLLQHQRIHTREQLCECNECGKVFSHQKRLLEHQKVHTGEKPCECSECGKCFRHRTSLIQHQKVHSGERPYNCTACEKAFIYKNKLVEHQRIHTGEKPYECGKCGKAFNKRYSLVRHQKVHITEEP

SEQ ID NO: 32560 - protein, 17 aa, Homo sapiens
  MAP TO AC003682.1; EXPRESSED IN BRAIN, SIGNAL =   2; EXPRESSED IN HEART, SIGNAL = 2.1; EXPRESSED IN FETAL LIVER, SIGNAL = 2.4; EXPRESSED IN ADULT LIVER, SIGNAL = 2.2; EXPRESSED IN PLACENTA, SIGNAL = 2.1
ILHLHFYAFRLFAWNRG

SEQ ID NO: 32561 - protein, 236 aa, Homo sapiens
  MAP TO AF099810.1; EXPRESSED IN ADULT LIVER, SIGNAL = 1.7; EXPRESSED IN HEART, SIGNAL = 1.9; EXPRESSED IN PLACENTA, SIGNAL = 1.6; SWISSPROT HIT: P31696, EVALUE 2.00e-17
MSSTLHSVFFTLKVSILLGSLLGLCLGLEFMGLPNQWARYLRWDASTRSDLSFQFKTNVSTGLLLYLDDGGVCDFLCLSLVDGRVQLRFSMDCAETAVLSNKQVNDSSWHFLMVSRDRLRTVLMLDGEGQSGELQPQRPYMDVVSDLFLGGVPTDIRPSALTLDGVQAMPGFKGLILDLKYGNSEPRLLGSRGVQMDAEGPCGERPCENGGICFLLDGHPTCDCSTTGYGGKLCSE

SEQ ID NO: 32562 - protein, 48 aa, Homo sapiens
  MAP TO AF099810.1; EXPRESSED IN ADULT LIVER, SIGNAL = 1.7; EXPRESSED IN HEART, SIGNAL = 1.9; EXPRESSED IN PLACENTA, SIGNAL = 1.6; SWISSPROT HIT: P04023, EVALUE 6.30e+00
DPLRAVPWPVCSSGLCPSSDNELHTPLGFLHPEGQHPAGVPAGALPGP

SEQ ID NO: 32563 - protein, 268 aa, Homo sapiens
  MAP TO AC011248.8; EXPRESSED IN BRAIN, SIGNAL = 1.2; EXPRESSED IN HELA, SIGNAL = 0.56; EXPRESSED IN ADULT LIVER, SIGNAL = 1.2; EXPRESSED IN FETAL LIVER, SIGNAL = 1.2; SWISSPROT HIT: Q03273, EVALUE 2.20e+00
ACMTSKRPPLVVAIFKSWKIPNQPPIWFLPRLPYCILETLGLPQNALLSRPRILPSGTVSPPSHQPPPPLSWGTAAGIFNICREAPPFVNMQFLFSVFFWGPTPVTLLGTINIHRIDPSSIWSHSSLTVYFRDLSLQPRPFAPVSITHYQPSPGAVSPLKSFFRCHALSPWSSHSALTQPNTLAPSSVSPALGTPQFQTHVASFFHISTLMLHRHLKLSMSRTQFLIFPSKLFSHQLPHPTATHHATQAQSLQVSLDPCLPLTSVSSP

SEQ ID NO: 32564 - protein, 152 aa, Homo sapiens
  MAP TO D87016.2; EXPRESSED IN HELA, SIGNAL = 0.58; EXPRESSED IN ADULT LIVER, SIGNAL = 1.4; SWISSPROT HIT: P04208, EVALUE 8.00e-41
SWAQSVLTQPPSASGTPGQRVTISCSGSSSNIGSNYVYWYQQLPGTAPKLLIYSNNQRPSGVPDRFSGSKSGTSASLAISGLRSEDEADYYCAAWDDSLSGPTVLQAQGELRQEPPSSSVRRVSPGSCCSGPACGFCCCSFPHGSKGIQGPA

SEQ ID NO: 32565 - protein, 127 aa, Homo sapiens
  MAP TO AP001754.1; EXPRESSED IN ADULT LIVER, SIGNAL = 1.1; SWISSPROT HIT: P24014, EVALUE 4.00e-07
LRGLQEVPEDIPANTVLLKLDANKISHLPDGAFQHLHRLRELDLSHNAIEAIGSATFAGLAGGLRLLDLSYNRIQRIPKDALGKLSAKIRLSHNPLHCECALQEALWELKLDPDSVDEIACHTSVQE

SEQ ID NO: 32566 - protein, 56 aa, Homo sapiens
  MAP TO AP001754.1; EXPRESSED IN ADULT LIVER, SIGNAL = 1.1; SWISSPROT HIT: Q47945, EVALUE 7.30e-01
TTDVAMLVTMFGWFAMVIAYVVYYVRHNQEDARRHLEYLKSLPSAPASKDPIGPGP

SEQ ID NO: 32567 - protein, 68 aa, Homo sapiens
  MAP TO AP001754.1; EXPRESSED IN ADULT LIVER, SIGNAL = 1.1
WAPCAHLAPRSCWSPPGSLVSSSSSACTWAPPAHSPAGALTTQGLWLSSAACGAFRRSPRTSRPTPCS

SEQ ID NO: 32568 - protein, 39 aa, Homo sapiens
  MAP TO AP001754.1; EXPRESSED IN ADULT LIVER, SIGNAL = 1.1
GHRAPTSPLAPAGLHPGVLSLPPLLPAPGRRLPTALPVP

SEQ ID NO: 32569 - protein, 72 aa, Homo sapiens
  MAP TO AL137070.3; EXPRESSED IN BRAIN, SIGNAL = 1.5; EXPRESSED IN ADULT LIVER, SIGNAL = 1.8; EXPRESSED IN BONE MARROW, SIGNAL = 6.5; SWISSPROT HIT: P07293, EVALUE 2.40e-01
KKDLASGPVGSAPRWRPPAVSSTRSTRAPPTGSWRTSRTGFCSNMTPRRRQSSAAGSRDSLASPSAPTSRRA

SEQ ID NO: 32570 - protein, 263 aa, Homo sapiens
  MAP TO AL078621.19; EXPRESSED IN PLACENTA, SIGNAL = 2.3; EXPRESSED IN ADULT LIVER, SIGNAL =   2; EXPRESSED IN HELA, SIGNAL = 4.2; SWISSPROT HIT: P09661, EVALUE 0.00e+00
RGGTGGCRMVKLTAELIEQAAQYTNAVRDRELDLRGYKIPVIENLGATLDQFDAIDFSDNEIRKLDGFPLLRRLKTLLGNNNRICRIGEGLDQALPCLTELILTNNRLVELGDLDPLASLKSLTYLSILRNLVTNKKHYRLYVIYKVPQVRVLDFQKVKLKERQEAEKMFKGKRGAQLAKDIARRSKTFNPGAGLPTDKKKGGPSPGDVETIKNAIANASTLAEVERLKGLLQSGQIPGRERKSGPTGDGEEEMEEDTVTNGS

SEQ ID NO: 32571 - protein, 155 aa, Homo sapiens
  MAP TO AC006512.12; EXPRESSED IN ADULT LIVER, SIGNAL = 3.2; EXPRESSED IN PLACENTA, SIGNAL = 3.8; EXPRESSED IN FETAL LIVER, SIGNAL = 2.4; SWISSPROT HIT: P54259, EVALUE 1.00e-48
ELPRPQSPSDLDSLDGRSLNDDGSSDPRDIDQDNRSTSPSIYSPGSVENDSDSSSGLSQGPARPYHPPPLFPPSPQPPDSTPRQPEASFEPHPSVTPTGYHAPMEPPTSRMFQAPPGAPPPHPQLYPGGTGGVLSGPPMGPKGGGAASSVGGPNG

SEQ ID NO: 32572 - protein, 18 aa, Homo sapiens
  MAP TO AC006512.12; EXPRESSED IN ADULT LIVER, SIGNAL = 3.2; EXPRESSED IN PLACENTA, SIGNAL = 3.8; EXPRESSED IN FETAL LIVER, SIGNAL = 2.4
PGQPKHVPQYLQPWKCGE

SEQ ID NO: 32573 - protein, 173 aa, Homo sapiens
  MAP TO AL121907.2; EXPRESSED IN ADULT LIVER, SIGNAL = 2.5; EXPRESSED IN FETAL LIVER, SIGNAL =   2; SWISSPROT HIT: P42694, EVALUE 3.00e-07
EPLLHVALLKQEPGADFSLVAPGLPPGRLYARGERFRVPSSTADFQVGVRVQAASFGTFEQWVVFDFGRRPVLLQKLGLQLGQGRRPGPCRNLALGHPEEMERWHTGNRHVVPGVERTAEQTALMAKYKGPALALEFNRSSVASGPISPTNYRQRMHQFLYEEEAAQQQLVAK

SEQ ID NO: 32574 - protein, 113 aa, Homo sapiens
  MAP TO AL035682.16; EXPRESSED IN HEART, SIGNAL = 1.9; EXPRESSED IN LUNG, SIGNAL = 1.3; EXPRESSED IN ADULT LIVER, SIGNAL = 1.3; EXPRESSED IN PLACENTA, SIGNAL = 1.9; EXPRESSED IN HELA, SIGNAL = 0.68; EXPRESSED IN BONE MARROW, SIGNAL = 1.3; SWISSPROT HIT: Q04561, EVALUE 4.70e+00
LCFRDPLHPTIALHLECLPGNFLAPHSSACNQHYQMGRGPKLRQGPAWVLAAGSVYLEIALVSLWWLGLAGSHFSPSDAPKSSRTCTYRVQASFQKSTLVSRLLLMAGAVFSL

SEQ ID NO: 32575 - protein, 69 aa, Homo sapiens
  MAP TO AC007567.1; EXPRESSED IN LUNG, SIGNAL = 1.8; EXPRESSED IN HEART, SIGNAL = 2.3; EXPRESSED IN ADULT LIVER, SIGNAL = 1.9; EXPRESSED IN BRAIN, SIGNAL = 2.1; EXPRESSED IN HELA, SIGNAL = 3.7; EXPRESSED IN BONE MARROW, SIGNAL = 2.1; EXPRESSED IN FETAL LIVER, SIGNAL = 1.7; SWISSPROT HIT: P44312, EVALUE 3.10e-01
TLGLCPGSAPPLKFITVSPTHIFTHSHTHACTSLPTRKSHLKSIFFSNLFPAQQRRYDTSQSSTVTCIT

SEQ ID NO: 32576 - protein, 215 aa, Homo sapiens
  MAP TO AP000345.1; EXPRESSED IN ADULT LIVER, SIGNAL = 1.7; EXPRESSED IN HELA, SIGNAL = 2.9; EXPRESSED IN BONE MARROW, SIGNAL =   2; EXPRESSED IN LUNG, SIGNAL = 1.9; SWISSPROT HIT: P10266, EVALUE 1.00e-104
QDFNQSINIVSDSAYVVQATKDIERALIKYIMDDQLNPLFNLLQQNVRKRNFPFYITHIRAHTNLPGPLTKANEQADLLVSSAFMEAQELHALTHVNAIGLKNKFDITWKQTKNIVQHCTQCQILHLATQEARVNPRGLCPNVLWQMDVMHVPSFGKLSFVHVTVDTYSHFIWATCQTGESTSHVKRHLLSCFPVMGVPEKVKTDNGPGYCSKAV

SEQ ID NO: 32577 - protein, 58 aa, Homo sapiens
  MAP TO AL021707.2; EXPRESSED IN ADULT LIVER, SIGNAL = 1.9; EXPRESSED IN PLACENTA, SIGNAL = 1.9; EXPRESSED IN BRAIN, SIGNAL = 1.2; EXPRESSED IN HELA, SIGNAL = 1.7; EXPRESSED IN BONE MARROW, SIGNAL = 2.1; EXPRESSED IN LUNG, SIGNAL = 1.2; EXPRESSED IN HEART, SIGNAL =   2; SWISSPROT HIT: O60512, EVALUE 8.00e+00
RRNKEEDNSRLCSDQELNRGGSSRRFWADGNSGQDLSTRQRKFRPRALKMVAAVGRLL

SEQ ID NO: 32578 - protein, 31 aa, Homo sapiens
  MAP TO AC007567.1; EXPRESSED IN ADULT LIVER, SIGNAL = 8.2; EXPRESSED IN BRAIN, SIGNAL = 8.2; EXPRESSED IN HELA, SIGNAL =  14; EXPRESSED IN LUNG, SIGNAL = 8.8; EXPRESSED IN HEART, SIGNAL = 7.6; EXPRESSED IN BONE MARROW, SIGNAL =   9; EXPRESSED IN FETAL LIVER, SIGNAL = 8.7
AHSDFLPKSTVWKDWVVSLQCRNLINTTSAR

SEQ ID NO: 32579 - protein, 275 aa, Homo sapiens
  MAP TO Z97055.1; EXPRESSED IN ADULT LIVER, SIGNAL = 2.2; EXPRESSED IN BONE MARROW, SIGNAL =   2; EXPRESSED IN FETAL LIVER, SIGNAL = 2.2; EXPRESSED IN LUNG, SIGNAL =   2; EXPRESSED IN HEART, SIGNAL = 2.1; SWISSPROT HIT: Q25464, EVALUE 4.00e-12
TLCRLGPCGTCSVRTLCRLGPCGTCSVRTLCRQGPCGTCSVRMLCRLGPCGAFSLMCRQAPCGTCSWRTLCRQDPCGTCSVRTLCRQGPCGTCSWRTLCRQDPCGTCSVRTLCRQAPCGTCSWRTLCRQDPCGTCSVRTLCRQGPCGTCSVRTLCRQGPCGTCSWRTLCRQGPCGTCSVRTLCRQGPCGTCSWRTLCRQAPCGTCSWRTLCGQGPCGTCSRRTLCRQGPCGTCSVRTLCRQAPCGTRSVACSLCDRVFSGVDSEVLLFFLHIPDG

SEQ ID NO: 32580 - protein, 45 aa, Homo sapiens
  MAP TO AC006992.2; EXPRESSED IN FETAL LIVER, SIGNAL = 2.2; EXPRESSED IN ADULT LIVER, SIGNAL = 1.7; EXPRESSED IN PLACENTA, SIGNAL =   2; EXPRESSED IN BRAIN, SIGNAL =   2; EXPRESSED IN HELA, SIGNAL = 3.4; EXPRESSED IN LUNG, SIGNAL = 1.8; EXPRESSED IN HEART, SIGNAL = 2.1; EXPRESSED IN BONE MARROW, SIGNAL = 2.2
KVSCLCLKCFSIILFLNGLKFMVLILCFTVYRSKKKSHFLLAVGS

SEQ ID NO: 32581 - protein, 51 aa, Homo sapiens
  MAP TO AC007564.9; EXPRESSED IN HELA, SIGNAL = 1.2; EXPRESSED IN ADULT LIVER, SIGNAL = 2.6; EXPRESSED IN FETAL LIVER, SIGNAL = 2.4; EXPRESSED IN LUNG, SIGNAL = 2.7
LRQIQKRIFQNVLFSNIPARIDVQPPKVNTFTRLLFLFILLFFKKKILLFF

SEQ ID NO: 32582 - protein, 24 aa, Homo sapiens
  MAP TO AC008283.3; EXPRESSED IN PLACENTA, SIGNAL = 1.8; EXPRESSED IN HELA, SIGNAL = 4.3; EXPRESSED IN BONE MARROW, SIGNAL = 1.8; EXPRESSED IN LUNG, SIGNAL = 1.7; EXPRESSED IN HEART, SIGNAL = 1.6; EXPRESSED IN FETAL LIVER, SIGNAL = 1.2; EXPRESSED IN ADULT LIVER, SIGNAL = 1.8
QGLHFSHLFVSVGPYDKFIPIENE

SEQ ID NO: 32583 - protein, 27 aa, Homo sapiens
  MAP TO AC008283.3; EXPRESSED IN PLACENTA, SIGNAL = 2.4; EXPRESSED IN HELA, SIGNAL = 3.8; EXPRESSED IN ADULT LIVER, SIGNAL = 2.9; EXPRESSED IN BONE MARROW, SIGNAL = 3.4; EXPRESSED IN HEART, SIGNAL = 3.3; EXPRESSED IN LUNG, SIGNAL = 3.2
PRWRSHCYATLIGFAGNLPSEVPGLSL

SEQ ID NO: 32584 - protein, 84 aa, Homo sapiens
  MAP TO AL049649.4; EXPRESSED IN ADULT LIVER, SIGNAL = 3.2; EXPRESSED IN PLACENTA, SIGNAL = 2.8; EXPRESSED IN HELA, SIGNAL = 3.4; EXPRESSED IN LUNG, SIGNAL = 3.7; EXPRESSED IN BONE MARROW, SIGNAL = 3.4; EXPRESSED IN FETAL LIVER, SIGNAL = 3.3; SWISSPROT HIT: P57338, EVALUE 3.10e+00
SPFPADISSMSSTQTADRKSPGGNWGHEMKTQDARVSHLLASLGHIGRRRIILGHAGNTLTITDELKKITKKSDNVLRKFTNLC

SEQ ID NO: 32585 - protein, 73 aa, Homo sapiens
  MAP TO AL022238.1; EXPRESSED IN ADULT LIVER, SIGNAL = 1.7; EXPRESSED IN LUNG, SIGNAL = 1.8; EXPRESSED IN HEART, SIGNAL =   2; EXPRESSED IN PLACENTA, SIGNAL = 1.6; EXPRESSED IN HELA, SIGNAL = 1.7; SWISSPROT HIT: P33634, EVALUE 8.30e+00
SQLPLTAHSRIRKLCCIRPLLQLQTVALQGDPSFTLHPSVFRLFLRLKMCFLRWNTQLTPHLSSLSAALQCYS

SEQ ID NO: 32586 - protein, 50 aa, Homo sapiens
  MAP TO AC005300.10; EXPRESSED IN LUNG, SIGNAL = 9.5; EXPRESSED IN BONE MARROW, SIGNAL =  11; EXPRESSED IN FETAL LIVER, SIGNAL = 8.3; EXPRESSED IN ADULT LIVER, SIGNAL = 8.9; EXPRESSED IN PLACENTA, SIGNAL = 4.6; EXPRESSED IN BRAIN, SIGNAL = 8.1; EXPRESSED IN HELA, SIGNAL =  16
IDWVSCENRNLFLILLETGQSKIKASADLVSGEGLIPAPWLAWTREVASL

SEQ ID NO: 32587 - protein, 50 aa, Homo sapiens
  MAP TO AP000356.1; EXPRESSED IN HELA, SIGNAL =   2; EXPRESSED IN ADULT LIVER, SIGNAL = 1.8; EXPRESSED IN PLACENTA, SIGNAL = 1.7; EXPRESSED IN BRAIN, SIGNAL = 1.8; EXPRESSED IN LUNG, SIGNAL = 1.8; EXPRESSED IN FETAL LIVER, SIGNAL = 1.8; SWISSPROT HIT: P50403, EVALUE 1.70e+00
SHDKGCPWPVRWLSPARTFLGLPGCGSARELPGQLSRGERGLSHGPLPAV

SEQ ID NO: 32588 - protein, 173 aa, Homo sapiens
  MAP TO AP000356.1; EXPRESSED IN HELA, SIGNAL = 2.3; EXPRESSED IN LUNG, SIGNAL = 2.6; EXPRESSED IN HEART, SIGNAL = 1.5; EXPRESSED IN FETAL LIVER, SIGNAL = 1.5; EXPRESSED IN ADULT LIVER, SIGNAL = 2.2; EXPRESSED IN BRAIN, SIGNAL = 1.8; SWISSPROT HIT: P19440, EVALUE 4.00e-18
VDRDQAGPGKVGHCLTWLGGSFGSKVRSPVSGILFNNEMDDFSSPSITNEFGVPPSPANFIQPGMGWRSGGGGLGWRGAGVLGRQLTGIPVFSHRPQGSSRSRPCARRSWWARTARSGWWWELLGAHRSPRPLHWYVSHLFSLAVPTLHSPQAMLITLPCPRPSSTTSGSAMT

SEQ ID NO: 32589 - protein, 25 aa, Homo sapiens
  MAP TO AC007463.3; EXPRESSED IN LUNG, SIGNAL = 2.2; EXPRESSED IN HELA, SIGNAL = 1.2; EXPRESSED IN ADULT LIVER, SIGNAL =   2; EXPRESSED IN HEART, SIGNAL = 2.1; EXPRESSED IN BONE MARROW, SIGNAL = 2.4
FNMHVRGSNGCWLSGLDTLNSPYST

SEQ ID NO: 32590 - protein, 37 aa, Homo sapiens
  MAP TO AC008009.4; EXPRESSED IN LUNG, SIGNAL = 0.93; EXPRESSED IN HEART, SIGNAL = 1.3; EXPRESSED IN BRAIN, SIGNAL = 1.1; EXPRESSED IN ADULT LIVER, SIGNAL = 1.4
MMLKVMVCEKVKLGSSGVLELSKPHPTLSHITSDVSG

SEQ ID NO: 32591 - protein, 52 aa, Homo sapiens
  MAP TO AC008151.1; EXPRESSED IN HELA, SIGNAL = 0.38; EXPRESSED IN ADULT LIVER, SIGNAL = 2.6; EXPRESSED IN PLACENTA, SIGNAL = 1.6; EXPRESSED IN BRAIN, SIGNAL = 1.9; EXPRESSED IN HEART, SIGNAL = 2.2; EXPRESSED IN LUNG, SIGNAL = 2.2; EXPRESSED IN FETAL LIVER, SIGNAL = 2.1; SWISSPROT HIT: Q09175, EVALUE 8.10e+00
GQDTGYSIFTEHLWPLVTTYREGSRAPRGEGTCTRSHSKSEAQLTFPVPGFL

SEQ ID NO: 32592 - protein, 71 aa, Homo sapiens
  MAP TO AL008723.8; EXPRESSED IN PLACENTA, SIGNAL = 2.8; EXPRESSED IN ADULT LIVER, SIGNAL = 1.7; EXPRESSED IN BRAIN, SIGNAL = 1.7; EXPRESSED IN BONE MARROW, SIGNAL = 1.7; EXPRESSED IN LUNG, SIGNAL = 1.7; EXPRESSED IN HEART, SIGNAL = 2.3; SWISSPROT HIT: P17158, EVALUE 1.70e+00
LTHHQLPVDRLLFLIPTPNSCFPTHGYISSLLYKPLILVHQEDGFETELPSPLLWHLNKAFFPGNTHCLSD

SEQ ID NO: 32593 - protein, 56 aa, Homo sapiens
  MAP TO AL022312.7; EXPRESSED IN ADULT LIVER, SIGNAL = 2.3; EXPRESSED IN PLACENTA, SIGNAL = 5.3; EXPRESSED IN HELA, SIGNAL = 1.4; EXPRESSED IN FETAL LIVER, SIGNAL =   4; EXPRESSED IN HEART, SIGNAL = 2.8; EXPRESSED IN LUNG, SIGNAL = 2.5
AFSKKWVCPLVYFCFPQAWMHTGGWALEQPLCTQNWKVRMKKRRAALPALGHLNLD

SEQ ID NO: 32594 - protein, 38 aa, Homo sapiens
  MAP TO AL035682.16; EXPRESSED IN HELA, SIGNAL =   1; EXPRESSED IN ADULT LIVER, SIGNAL = 1.5; EXPRESSED IN BRAIN, SIGNAL = 1.3; EXPRESSED IN BONE MARROW, SIGNAL = 1.5; EXPRESSED IN FETAL LIVER, SIGNAL = 1.2; EXPRESSED IN LUNG, SIGNAL = 1.3; EXPRESSED IN HEART, SIGNAL = 1.7
SSLSPAALMLSFPPYPLDDALVHGKYSITFIYEQNTEA

SEQ ID NO: 32595 - protein, 115 aa, Homo sapiens
  MAP TO Z83844.5; EXPRESSED IN PLACENTA, SIGNAL =   3; EXPRESSED IN ADULT LIVER, SIGNAL = 1.8; EXPRESSED IN BRAIN, SIGNAL = 1.7; EXPRESSED IN HEART, SIGNAL = 1.8; EXPRESSED IN BONE MARROW, SIGNAL = 1.9; EXPRESSED IN FETAL LIVER, SIGNAL = 1.5; SWISSPROT HIT: O76094, EVALUE 1.60e+00
LHRDPLRAQRAVQTSSTARTVQFLPLTRTKCPTDPPMGPPVLSFPRLQETMGGGASHRLGSETLWSPPRSLWEGSVLASPTFWVPPRGAQPRGLGATSCSMSHGDLCQAPPPRPR

SEQ ID NO: 32596 - protein, 110 aa, Homo sapiens
  MAP TO Z97055.1; EXPRESSED IN LUNG, SIGNAL = 1.6; EXPRESSED IN HEART, SIGNAL = 1.3; EXPRESSED IN BONE MARROW, SIGNAL = 1.4; EXPRESSED IN FETAL LIVER, SIGNAL = 1.5; EXPRESSED IN PLACENTA, SIGNAL = 1.8; EXPRESSED IN ADULT LIVER, SIGNAL = 1.6; EXPRESSED IN HELA, SIGNAL = 0.81
GLQCLLNNGWLREWLLRKCLYQECLGRTPNRLHFQNDPDLALWNLHIVIEVSLAFMIPQLVEIRTRGDPTGHPDHSPSGRVLPAVYSVALGGITFHMIIFFSCCLQLSVS

SEQ ID NO: 32597 - protein, 73 aa, Homo sapiens
  MAP TO AC008151.1; EXPRESSED IN ADULT LIVER, SIGNAL = 1.5; EXPRESSED IN LUNG, SIGNAL =   1; SWISSPROT HIT: Q47086, EVALUE 3.80e+00
SWKGQRFVLGGIDIYSGYGFAFLAHNTFAETTTHGITECLSTVMVFYIAFASVQGTHFTAKEVQHWACVHGIY

SEQ ID NO: 32598 - protein, 170 aa, Homo sapiens
  MAP TO AC006427.13; EXPRESSED IN HEART, SIGNAL =   3; EXPRESSED IN BONE MARROW, SIGNAL = 2.4; EXPRESSED IN FETAL LIVER, SIGNAL = 2.6; EXPRESSED IN LUNG, SIGNAL = 2.3; EXPRESSED IN ADULT LIVER, SIGNAL = 2.6; EXPRESSED IN HELA, SIGNAL = 2.1; SWISSPROT HIT: Q9ZM99, EVALUE 2.00e+00
EKFATATVKNWKLSSPPKSRTDTAQCQVDQKPSVSDGTSQSPGKIVSSESLGTVLFFTSRHLSILKMQKYIYIYHYTSLGSETMEVLLCITIRLVKSNCGFHRYFQWRKLQLFLHQPNINVPKSSPFQLNISTYNHSSKSNHFAILAVFSWKKINYNKKLIILHITLCDG

SEQ ID NO: 32599 - protein, 31 aa, Homo sapiens
  MAP TO AP000353.1; EXPRESSED IN ADULT LIVER, SIGNAL = 1.3; EXPRESSED IN PLACENTA, SIGNAL = 1.5; EXPRESSED IN HELA, SIGNAL = 1.9; EXPRESSED IN BONE MARROW, SIGNAL = 1.2; EXPRESSED IN FETAL LIVER, SIGNAL = 1.2
PGRDKRLLTTLCQALPEPLRHRCENLELPTI

SEQ ID NO: 32600 - protein, 155 aa, Homo sapiens
  MAP TO AC007262.4; EXPRESSED IN HELA, SIGNAL = 2.5; EXPRESSED IN BRAIN, SIGNAL = 1.2; EXPRESSED IN ADULT LIVER, SIGNAL = 1.3; EXPRESSED IN FETAL LIVER, SIGNAL = 1.2; EXPRESSED IN HEART, SIGNAL = 1.3; EXPRESSED IN LUNG, SIGNAL = 1.3; EXPRESSED IN BONE MARROW, SIGNAL = 1.2; SWISSPROT HIT: P53399, EVALUE 8.10e-01
VITLNPPSGDERQCKIELHVKHMCKDTMSFPLNSPGQQSGSKILGQLTTDFVHHYIVAGDFSELFHLPSLRKYKTRHLVLKVILNISENPTAARDMINMKALAASKLIFNHKEAKASLVSGVAIFINIKEHIRKGSIVVVDHLSYNTLMGILREV

SEQ ID NO: 32601 - protein, 18 aa, Homo sapiens
  MAP TO AC008283.3; EXPRESSED IN HELA, SIGNAL = 3.9; EXPRESSED IN ADULT LIVER, SIGNAL =   2; EXPRESSED IN HEART, SIGNAL = 1.9; EXPRESSED IN FETAL LIVER, SIGNAL = 1.9
SSKGRDRWIQVTHRGMAL

SEQ ID NO: 32602 - protein, 41 aa, Homo sapiens
  MAP TO AL024509.1; EXPRESSED IN FETAL LIVER, SIGNAL = 1.4; EXPRESSED IN BRAIN, SIGNAL = 1.3; EXPRESSED IN ADULT LIVER, SIGNAL = 1.6; EXPRESSED IN PLACENTA, SIGNAL = 1.5; EXPRESSED IN LUNG, SIGNAL = 1.6
PIVEQINKTINLYFLLLVNKSESESLMRINVLKDDEGALKK

SEQ ID NO: 32603 - protein, 157 aa, Homo sapiens
  MAP TO AL008723.8; EXPRESSED IN ADULT LIVER, SIGNAL = 2.9; EXPRESSED IN PLACENTA, SIGNAL = 4.4; EXPRESSED IN HELA, SIGNAL = 0.86; EXPRESSED IN BONE MARROW, SIGNAL =  83; EXPRESSED IN HEART, SIGNAL = 2.7; SWISSPROT HIT: P49907, EVALUE 1.10e+00
QRFVLGTLCDTLLRHCGPCLRGPALALRGPDPSSYTEVRGLPGTQQDADLLPLAHSQASPRPPPRSLCSRPPLRSSKPKGHTAVSHEWLLPGSCDGGLEGKQHPCHPGYGSHQGLQTEQQVHSQKRPEPDTPSMEVPQQLQLPGHTQRERCGEDSGP

SEQ ID NO: 32604 - protein, 49 aa, Homo sapiens
  MAP TO AC007286.18; EXPRESSED IN ADULT LIVER, SIGNAL = 1.8; EXPRESSED IN PLACENTA, SIGNAL = 2.1; EXPRESSED IN BRAIN, SIGNAL = 1.9; EXPRESSED IN HELA, SIGNAL = 4.6; EXPRESSED IN LUNG, SIGNAL = 1.9; EXPRESSED IN HEART, SIGNAL = 2.2
TLEGDREEVEPVCVEGCEHWDFKDEVCRGPSLHLYMISSSIFVTLHCIL

SEQ ID NO: 32605 - protein, 46 aa, Homo sapiens
  MAP TO AC006548.19; EXPRESSED IN ADULT LIVER, SIGNAL = 1.2; EXPRESSED IN BRAIN, SIGNAL = 1.1; EXPRESSED IN HELA, SIGNAL = 1.9; EXPRESSED IN FETAL LIVER, SIGNAL = 1.3
GEETMFCLVTSTERVSSCNHSFVTFLLPELPGPTPPPFDWLRALML

SEQ ID NO: 32606 - protein, 30 aa, Homo sapiens
  MAP TO AP000127.1; EXPRESSED IN ADULT LIVER, SIGNAL = 1.9; EXPRESSED IN BRAIN, SIGNAL = 2.2; EXPRESSED IN HELA, SIGNAL =   3; EXPRESSED IN LUNG, SIGNAL = 1.9; EXPRESSED IN HEART, SIGNAL = 2.1; EXPRESSED IN FETAL LIVER, SIGNAL = 1.9
PEIQHSVHYILMILVNDNDLKKYDYEITMA

SEQ ID NO: 32607 - protein, 193 aa, Homo sapiens
  MAP TO AL034425.6; EXPRESSED IN PLACENTA, SIGNAL = 1.8; EXPRESSED IN ADULT LIVER, SIGNAL = 1.6; EXPRESSED IN BRAIN, SIGNAL = 1.5; EXPRESSED IN HEART, SIGNAL = 1.8; EXPRESSED IN LUNG, SIGNAL = 1.3; EXPRESSED IN FETAL LIVER, SIGNAL = 1.5
TIFYIYPKNIVMCSTEIHQREGGLQSNINWLVTGSLGAECKLFSCYCTNEVQVIQAMRKQPIFSFFKRYQVKVTSKICTLYYSVGDLKRISSGHAAAFRCSSSPPPPPPPLAPPSLSLPALLSPRPVPPPSPSSSFPPSPPASSSPSSVSSLLILPPSPYLLFLFFLPVSSSSFSTSFFFFSSSIWHFAHRGT

SEQ ID NO: 32608 - protein, 134 aa, Homo sapiens
  MAP TO AL031282.1; EXPRESSED IN FETAL LIVER, SIGNAL = 2.4; EXPRESSED IN ADULT LIVER, SIGNAL = 2.5; EXPRESSED IN PLACENTA, SIGNAL = 2.4; EXPRESSED IN HELA, SIGNAL = 1.8; EXPRESSED IN BRAIN, SIGNAL = 2.5; SWISSPROT HIT: P21127, EVALUE 1.00e-09
RFDRDSGESEEAEEEVGEGTPQSSALTEGDYVPDSPALLPIELKQELPKYLPALQVRPSPRPGPLSALAVGVTTGAERSLAPVLASVASQGCWAHWGSDGRAQPLAPHASRSRLFLMLDGTGWTGSCPQDCSAA

SEQ ID NO: 32609 - protein, 64 aa, Homo sapiens
  MAP TO AP000346.1; EXPRESSED IN LUNG, SIGNAL = 2.6; EXPRESSED IN HELA, SIGNAL = 5.2; EXPRESSED IN ADULT LIVER, SIGNAL = 1.9; EXPRESSED IN BRAIN, SIGNAL =   3; EXPRESSED IN PLACENTA, SIGNAL = 2.4; EXPRESSED IN HEART, SIGNAL = 1.9; EXPRESSED IN BONE MARROW, SIGNAL =   3; SWISSPROT HIT: P53420, EVALUE 8.20e+00
QVQRLKSCHSFPSLSWALSLLLSAPLWGTPVLYGLHGGDPTLKGWPAPPHLWVFLIRWNERLYF

SEQ ID NO: 32610 - protein, 127 aa, Homo sapiens
  MAP TO AC002472.3; EXPRESSED IN BRAIN, SIGNAL = 1.2; EXPRESSED IN HELA, SIGNAL =   2; EXPRESSED IN BONE MARROW, SIGNAL = 1.6; EXPRESSED IN LUNG, SIGNAL = 1.4; EXPRESSED IN HEART, SIGNAL = 1.2; EXPRESSED IN ADULT LIVER, SIGNAL = 1.3; EXPRESSED IN PLACENTA, SIGNAL = 1.6
RDWEAGRWTHRTNTQLVLALLSCIAYLPPRPIMAPSPPAPKQPNPQLQPSRTKPHPRPLPLPLQPGQKLFSLTLPHRRRSQTAAASAGRPPTSSWSSHTSPFYNPEAPSLLWPLGSPCCQLLLAAGT

SEQ ID NO: 32611 - protein, 196 aa, Homo sapiens
  MAP TO AF019413.1; EXPRESSED IN HEART, SIGNAL =  16; EXPRESSED IN LUNG, SIGNAL = 9.6; EXPRESSED IN BONE MARROW, SIGNAL = 3.4; EXPRESSED IN PLACENTA, SIGNAL = 3.3; EXPRESSED IN HELA, SIGNAL = 0.85; EXPRESSED IN ADULT LIVER, SIGNAL = 2.3; EXPRESSED IN BRAIN, SIGNAL = 2.3; SWISSPROT HIT: P22105, EVALUE 2.00e-44
LSAEQDHPAPRMDFSEMTSGPPVIALASPSFSPGPKDIPLTLSPSFSTAEEETPSPTEPSTEAPEAPEEPLLGELTVTGSSPDSLSLSWTVPQGRFDSFTVQYKDRDGQPQVVRVRGEESEVTVGGLEPGRKYKMHLYGLHEGQRVGPVSTVGITGEWGDRPSSPGLPLQPPCVSPLDLGTSFDWASRFLSFLPCC

SEQ ID NO: 32612 - protein, 93 aa, Homo sapiens
  MAP TO AL031282.1; EXPRESSED IN HELA, SIGNAL = 1.2; EXPRESSED IN ADULT LIVER, SIGNAL = 2.3; EXPRESSED IN LUNG, SIGNAL = 1.8; EXPRESSED IN HEART, SIGNAL = 1.7; EXPRESSED IN FETAL LIVER, SIGNAL = 1.8; SWISSPROT HIT: P10144, EVALUE 3.10e-02
APSQELTKAVISGVAFLGAATPTPALLKRRHSRKAHVRCGPLISDFPASRATSPPAHCWSPSLVLAMAAHTNPDTRQIPTQSPVPDKQPLPST

SEQ ID NO: 32613 - protein, 37 aa, Homo sapiens
  MAP TO AP000350.1; EXPRESSED IN ADULT LIVER, SIGNAL = 1.9; EXPRESSED IN PLACENTA, SIGNAL = 1.8; EXPRESSED IN HELA, SIGNAL = 2.1; EXPRESSED IN FETAL LIVER, SIGNAL = 2.2; EXPRESSED IN BRAIN, SIGNAL = 1.6; EXPRESSED IN BONE MARROW, SIGNAL = 2.1; EXPRESSED IN HEART, SIGNAL = 2.1; EXPRESSED IN LUNG, SIGNAL = 1.9
KQTKTKMKKLKGNQKERKWRHHIGHREIQKFRKKYYE

SEQ ID NO: 32614 - protein, 97 aa, Homo sapiens
  MAP TO Z97055.1; EXPRESSED IN ADULT LIVER, SIGNAL = 2.9; EXPRESSED IN PLACENTA, SIGNAL = 4.6; EXPRESSED IN BRAIN, SIGNAL =   4; EXPRESSED IN HELA, SIGNAL = 2.4; EXPRESSED IN BONE MARROW, SIGNAL = 3.6; EXPRESSED IN LUNG, SIGNAL = 2.7; EXPRESSED IN HEART, SIGNAL = 2.9; EXPRESSED IN FETAL LIVER, SIGNAL = 2.6; SWISSPROT HIT: Q9T1V1, EVALUE 9.80e+00
EQTNTVNWYHREWGAAIKIPKNVEETLELGDRQRLEVWRAKKKTGICRKVSNFLETCWMVLAKMLIVIWTMKSTLRWSQMEMKNFMGTGAKVTLAML

SEQ ID NO: 32615 - protein, 166 aa, Homo sapiens
  MAP TO AL009172.1; EXPRESSED IN BONE MARROW, SIGNAL = 1.6; EXPRESSED IN PLACENTA, SIGNAL = 1.9; EXPRESSED IN BRAIN, SIGNAL = 1.4; EXPRESSED IN HELA, SIGNAL = 1.1; EXPRESSED IN ADULT LIVER, SIGNAL = 1.6; EXPRESSED IN HEART, SIGNAL = 1.7; EXPRESSED IN FETAL LIVER, SIGNAL = 1.4
TEGALTSLAGPPQTPLPGHLGRVRAAAGPAGPHHARREIGGHGRDHLRCGAGDSALPQSAVGSGGVVSCLRAQLCSWAPRSPPPRLLARPPLGPPAPSRSHELPAAPPVGQQLYGQSAKWVHDRPAASAAAPTAARCPQPRSHARSRDRHCREVLRGRPSGLSGRP

SEQ ID NO: 32616 - protein, 64 aa, Homo sapiens
  MAP TO AC004821.2; EXPRESSED IN ADULT LIVER, SIGNAL = 1.2; EXPRESSED IN BRAIN, SIGNAL = 1.4; EXPRESSED IN BONE MARROW, SIGNAL = 0.9; EXPRESSED IN HEART, SIGNAL = 1.2; SWISSPROT HIT: Q21184, EVALUE 6.90e-01
FHLRDRGKRWLGHGAEGPGTPRTPALPVEHAWAGENTKDPTSACQPCWRHCVGHPGPSFAGGSC

SEQ ID NO: 32617 - protein, 22 aa, Homo sapiens
  MAP TO AC008272.1; EXPRESSED IN HELA, SIGNAL = 1.2; EXPRESSED IN ADULT LIVER, SIGNAL = 1.4; EXPRESSED IN BRAIN, SIGNAL = 1.3; EXPRESSED IN HEART, SIGNAL = 1.6; EXPRESSED IN LUNG, SIGNAL = 1.4; EXPRESSED IN BONE MARROW, SIGNAL = 1.3; EXPRESSED IN FETAL LIVER, SIGNAL = 1.4
GLSEIVKTVTKGIKTSEILFTI

SEQ ID NO: 32618 - protein, 111 aa, Homo sapiens
  MAP TO AC002472.3; EXPRESSED IN HEART, SIGNAL = 1.7; EXPRESSED IN BONE MARROW, SIGNAL = 2.3; EXPRESSED IN FETAL LIVER, SIGNAL = 1.6; EXPRESSED IN LUNG, SIGNAL = 1.9; EXPRESSED IN ADULT LIVER, SIGNAL = 1.8
NHILTHVALCPSKAPNLESLCSHSEELVVKARRSPGRRARLRSRLGFARGRKQPRPPAWLPLPPTSLHLHPVSPCPSPPPPAPWLPTPLTSSQQVSSRSWRPIVHMSFNLY

SEQ ID NO: 32619 - protein, 31 aa, Homo sapiens
  MAP TO AC008151.1; EXPRESSED IN ADULT LIVER, SIGNAL =   2; EXPRESSED IN BRAIN, SIGNAL = 1.8; EXPRESSED IN HELA, SIGNAL = 0.54; EXPRESSED IN HEART, SIGNAL = 2.3; EXPRESSED IN BONE MARROW, SIGNAL = 2.2; EXPRESSED IN FETAL LIVER, SIGNAL = 1.9; EXPRESSED IN PLACENTA, SIGNAL = 2.3; EXPRESSED IN LUNG, SIGNAL = 1.8
GFTINVPFVIDMKGWGTKQVSQVAIFFCCPK

SEQ ID NO: 32620 - protein, 31 aa, Homo sapiens
  MAP TO AC008272.1; EXPRESSED IN ADULT LIVER, SIGNAL = 2.9; EXPRESSED IN HELA, SIGNAL = 5.1; EXPRESSED IN PLACENTA, SIGNAL = 5.3; EXPRESSED IN BRAIN, SIGNAL = 3.6; EXPRESSED IN HEART, SIGNAL = 3.2; EXPRESSED IN FETAL LIVER, SIGNAL = 3.6; EXPRESSED IN LUNG, SIGNAL = 3.2; SWISSPROT HIT: Q04447, EVALUE 8.70e+00
DVHHNTGKGIKSFCLPRAATRGLKNIYSPLA

SEQ ID NO: 32621 - protein, 141 aa, Homo sapiens
  MAP TO AL022319.2; EXPRESSED IN ADULT LIVER, SIGNAL = 2.3; EXPRESSED IN HELA, SIGNAL = 1.3; EXPRESSED IN PLACENTA, SIGNAL =   4; EXPRESSED IN BRAIN, SIGNAL = 2.1; EXPRESSED IN HEART, SIGNAL = 2.4; EXPRESSED IN FETAL LIVER, SIGNAL = 2.8; SWISSPROT HIT: P29555, EVALUE 1.30e+00
LRELRGGSLSSTNLGQSSGWPVAGQLWEPLSLWYLPMLSGTHLSHRVQLHLHGHLRGRDDIEGSSRFHPGPLLAPARAPGPGSAPASACHSPAIGFISLVAPWPTPLGASPGAGLPRPRGGQPRPHSQESQTHQTDGCREH

SEQ ID NO: 32622 - protein, 256 aa, Homo sapiens
  MAP TO AL020993.1; EXPRESSED IN PLACENTA, SIGNAL = 4.1; EXPRESSED IN ADULT LIVER, SIGNAL = 2.3; EXPRESSED IN HELA, SIGNAL = 1.2; EXPRESSED IN HEART, SIGNAL = 3.1; EXPRESSED IN LUNG, SIGNAL = 2.4; EXPRESSED IN FETAL LIVER, SIGNAL = 3.6; SWISSPROT HIT: P24708, EVALUE 2.00e-11
ATPPHCPHPGYSRPQGGQPRKLEQLDCQGYSRPQGGQPRKLEWLDCQGYSRPQGGQPRKLERLDCQGYSRPQGGQPRKLERLDCQGYSRPQGGQPRKLERLDCQGYSRPQGGQPRKLERLDCQGYSRPQGGQPRKLERLDCQGYSRPQGGQPRKLERLDCQGYSRPQGGQPRKLERLDCQGYSRPQGGQPRKLERLDCQGYSRPQGGQPRKLERLDCQGYSRPQGSQPRKLERLDCQPGNAGRDEETAEACSGVCL

SEQ ID NO: 32623 - protein, 28 aa, Homo sapiens
  MAP TO AL035701.13; EXPRESSED IN ADULT LIVER, SIGNAL = 1.6; EXPRESSED IN PLACENTA, SIGNAL = 1.4; EXPRESSED IN LUNG, SIGNAL = 1.2; EXPRESSED IN HEART, SIGNAL = 1.5; EXPRESSED IN BRAIN, SIGNAL = 1.3
HLRDIVHILFVHSVGAWLLKGWTKLLTI

SEQ ID NO: 32624 - protein, 25 aa, Homo sapiens
  MAP TO AP000354.1; EXPRESSED IN LUNG, SIGNAL =   2; EXPRESSED IN BRAIN, SIGNAL = 1.9; EXPRESSED IN HELA, SIGNAL = 2.3; EXPRESSED IN ADULT LIVER, SIGNAL = 2.1; EXPRESSED IN FETAL LIVER, SIGNAL = 1.9; EXPRESSED IN HEART, SIGNAL =   2
PLVPDPQQQLSKGSTEYCQVIRTQG

SEQ ID NO: 32625 - protein, 38 aa, Homo sapiens
  MAP TO AL023553.5; EXPRESSED IN PLACENTA, SIGNAL = 2.5; EXPRESSED IN BRAIN, SIGNAL = 1.7; EXPRESSED IN ADULT LIVER, SIGNAL = 1.6; EXPRESSED IN HELA, SIGNAL = 2.3; EXPRESSED IN BONE MARROW, SIGNAL =   2; EXPRESSED IN FETAL LIVER, SIGNAL = 1.8; EXPRESSED IN LUNG, SIGNAL = 1.6; EXPRESSED IN HEART, SIGNAL = 1.6
RRARALGDRWPGLLNSSDISCYMSWAFECCPMPQFPHL

SEQ ID NO: 32626 - protein, 44 aa, Homo sapiens
  MAP TO AC007463.3; EXPRESSED IN FETAL LIVER, SIGNAL = 1.8; EXPRESSED IN HELA, SIGNAL = 2.6; EXPRESSED IN ADULT LIVER, SIGNAL = 1.5; EXPRESSED IN PLACENTA, SIGNAL = 1.5; EXPRESSED IN BRAIN, SIGNAL = 1.6; EXPRESSED IN LUNG, SIGNAL = 1.6; EXPRESSED IN HEART, SIGNAL = 1.6
CLCVIHPNICKISEGLSSKLRKMVGAPSQKEICKCCLQLMFASV

SEQ ID NO: 32627 - protein, 25 aa, Homo sapiens
  MAP TO AL022310.1; EXPRESSED IN ADULT LIVER, SIGNAL = 3.7; EXPRESSED IN PLACENTA, SIGNAL = 5.6; EXPRESSED IN BRAIN, SIGNAL =   4; EXPRESSED IN BONE MARROW, SIGNAL = 4.7; EXPRESSED IN LUNG, SIGNAL = 3.9; EXPRESSED IN HEART, SIGNAL = 3.8
GMIKGVCIDVKSTRGEMWWVCTNTS

SEQ ID NO: 32628 - protein, 93 aa, Homo sapiens [sequence omitted]

SEQ ID NO: 32629 - protein, 72 aa, Homo sapiens
  MAP TO AC004624.6; EXPRESSED IN ADULT LIVER, SIGNAL = 1.2; EXPRESSED IN BRAIN, SIGNAL = 1.3; EXPRESSED IN HELA, SIGNAL = 1.1; EXPRESSED IN LUNG, SIGNAL = 1.2; EXPRESSED IN BONE MARROW, SIGNAL = 1.4; EXPRESSED IN FETAL LIVER, SIGNAL = 1.2; SWISSPROT HIT: P28329, EVALUE 6.50e-01
MPGVKWGREEGAGRSGRTQRKGRQGPDGRGLLSQTSEPGASPAGMTSHTKSFCGGVEFDLFKMLNSVLSFPI

SEQ ID NO: 32630 - protein, 186 aa, Homo sapiens
  MAP TO AC012283.1; EXPRESSED IN HELA, SIGNAL = 1.8; EXPRESSED IN ADULT LIVER, SIGNAL = 1.5; EXPRESSED IN LUNG, SIGNAL = 1.3; SWISSPROT HIT: P16112, EVALUE 5.00e-08
LAAMTSSKDILAAMPSSKDILAAMPSSKDIILAAMPSSKDILAAMPSSKDILAAMPSSKGILAAMPSSKDILAAMPSSKDIILAAMPSSKDILAAMPSSKGILAAMPSSKDIVAAMPSSKDILAAMPSSKGILAAMPSSKDILAAMPSSKDIVAAMPSSKDIVAAMPSSKDILAAMPSSKGMGGVN

SEQ ID NO: 32631 - protein, 89 aa, Homo sapiens
  MAP TO AL022319.2; EXPRESSED IN ADULT LIVER, SIGNAL = 2.1; EXPRESSED IN BRAIN, SIGNAL =   2; EXPRESSED IN HELA, SIGNAL = 2.1; EXPRESSED IN BONE MARROW, SIGNAL = 2.2; EXPRESSED IN LUNG, SIGNAL = 2.2; SWISSPROT HIT: P26969, EVALUE 1.60e+00
QPKGEKPVTIHINAKNGETQHIVKIKLLRNGELQKHTLSLYLNDKMFKSFSLSLGSPRSHFHSALCKSFHLAWYGKKTKYTVYGLKIKK

SEQ ID NO: 32632 - protein, 26 aa, Homo sapiens
  MAP TO AC008283.3; EXPRESSED IN HELA, SIGNAL = 3.4; EXPRESSED IN ADULT LIVER, SIGNAL =   3; EXPRESSED IN BRAIN, SIGNAL = 2.6; EXPRESSED IN HEART, SIGNAL =   3; EXPRESSED IN FETAL LIVER, SIGNAL = 2.9; EXPRESSED IN PLACENTA, SIGNAL = 3.8; EXPRESSED IN BONE MARROW, SIGNAL = 3.1; EXPRESSED IN LUNG, SIGNAL = 3.2
SIFIGQGRRMHLELSGRKCIISIAWY

SEQ ID NO: 32633 - protein, 132 aa, Homo sapiens
  MAP TO AC008151.1; EXPRESSED IN FETAL LIVER, SIGNAL = 1.7; EXPRESSED IN BRAIN, SIGNAL = 1.8; EXPRESSED IN ADULT LIVER, SIGNAL = 2.2; EXPRESSED IN LUNG, SIGNAL = 2.3; EXPRESSED IN HEART, SIGNAL = 1.9; EXPRESSED IN BONE MARROW, SIGNAL = 1.9; SWISSPROT HIT: O08464, EVALUE 6.10e+00
HLFPHGFGLPFCGGLVGDNREAIRCEVTVPAHLKIKLLDRQFAPRKGRAPVTARLPIRLAKAVSVLHHRPRVLLCMTLPSPSLSTGVQKWLEVSPHLFLLPLLFVRHRCSLNKSLASLIPSWHLPLEELGLI

SEQ ID NO: 32634 - protein, 30 aa, Homo sapiens
  MAP TO AC007262.4; EXPRESSED IN PLACENTA, SIGNAL = 1.5; EXPRESSED IN BRAIN, SIGNAL = 1.5; EXPRESSED IN ADULT LIVER, SIGNAL = 1.7; EXPRESSED IN BONE MARROW, SIGNAL = 1.8; EXPRESSED IN FETAL LIVER, SIGNAL = 1.7; EXPRESSED IN LUNG, SIGNAL = 1.6; EXPRESSED IN HEART, SIGNAL = 1.7; SWISSPROT HIT: P75824, EVALUE 6.60e+00
CSLTLFCEYRFPFQSGQYFSLIIRNKLEMT

SEQ ID NO: 32635 - protein, 61 aa, Homo sapiens
  MAP TO AL033375.2; EXPRESSED IN FETAL LIVER, SIGNAL = 1.2; EXPRESSED IN ADULT LIVER, SIGNAL = 1.2; EXPRESSED IN HEART, SIGNAL = 1.4
GLPTKLLHQGVGSGICARLHMPAIAAMLSVYVNCLGCGTSGSRAVAFLLHLLMQVVVVVVT

SEQ ID NO: 32636 - protein, 21 aa, Homo sapiens
  MAP TO Z82188.2; EXPRESSED IN FETAL LIVER, SIGNAL = 1.5; EXPRESSED IN BRAIN, SIGNAL = 1.3; EXPRESSED IN ADULT LIVER, SIGNAL = 1.4; EXPRESSED IN LUNG, SIGNAL = 1.2; EXPRESSED IN BONE MARROW, SIGNAL = 1.3
GSKMTRAIGSKFEPCQVDVGH

SEQ ID NO: 32637 - protein, 84 aa, Homo sapiens
  MAP TO AL031588.1; EXPRESSED IN BONE MARROW, SIGNAL = 1.5; EXPRESSED IN FETAL LIVER, SIGNAL = 1.7; EXPRESSED IN LUNG, SIGNAL = 1.2; EXPRESSED IN ADULT LIVER, SIGNAL = 1.9; SWISSPROT HIT: Q15750, EVALUE 3.20e+00
RRAASLPRRQDHGNSLPSLLCLVRASKEHPLKFKFYVPSSSKTQMGLSRVRPAAGTTARGSHSCDAVPSPSEGRRSQKGHLTFL

SEQ ID NO: 32638 - protein, 173 aa, Homo sapiens
  MAP TO AL049749.1; EXPRESSED IN BRAIN, SIGNAL = 2.2; EXPRESSED IN HELA, SIGNAL = 1.1; EXPRESSED IN LUNG, SIGNAL = 1.5; EXPRESSED IN BONE MARROW, SIGNAL = 2.8; EXPRESSED IN FETAL LIVER, SIGNAL = 1.4; EXPRESSED IN HEART, SIGNAL = 2.1
MMVVLVVVMVVVIIAMMQVVVIMKVVLMVVVVIVTMMQVAVIMKVVMIDGGNNDCDKDGGDESGDGDGGDGGGGDDGDDGGSDGGSDGGGNGDDGDDGGSDDGDGGGNYSHDAGGSDHEGGGDGGDGGGVDDGDGGGDDGGGSGGDSDGGGSDGGGNGGDGDGGGSDGGDGGG

SEQ ID NO: 32639 - protein, 330 aa, Homo sapiens
  MAP TO AC007498.2; EXPRESSED IN BRAIN, SIGNAL = 1.2; EXPRESSED IN HELA, SIGNAL = 1.8; EXPRESSED IN BONE MARROW, SIGNAL = 0.83; SWISSPROT HIT: P39806, EVALUE 2.00e-42
VLSSPAADCGPAGSATTFTNPLLPLMSEQFKAKFPFGGLLDSAQASETSKLQQLVENIDKKATDPNECIICHRVLSCQSALKMHYRTHTGERPFKCKICGRAFTTKGNLKTHYSVHRAMPPLRVQHSCPICQKKFTNAVVLQQHIRMHMGGQIPNTPVPDSYSESMESDTGSFDEKNFDDLDNFSDENMEDCPEGSIPDTPKSADASQDSLSSSPLPLEMSSIAALENQMKMINAGLAEQLQASLKSVENGSIEGDVLTNDSSSVGGDMESQSAGSPAISESTSSMQALSPSNSTQEFHKSPSIEEKPQRAVPSEFANGLSPTPVNGGAL

SEQ ID NO: 32640 - protein, 36 aa, Homo sapiens
  MAP TO AC007498.2; EXPRESSED IN BRAIN, SIGNAL = 1.2; EXPRESSED IN HELA, SIGNAL = 1.8; EXPRESSED IN BONE MARROW, SIGNAL = 0.83
SECIWEARSPTPQSPTATLSPWSLTQVPLMRKILMT

SEQ ID NO: 32641 - protein, 189 aa, Homo sapiens
  MAP TO AP000345.1; EXPRESSED IN HELA, SIGNAL = 1.5; EXPRESSED IN BONE MARROW, SIGNAL = 0.84; SWISSPROT HIT: P10264, EVALUE 5.00e-62
MASNSPATQDAALYPQPPTVRLNPTASRSGQGGALHAVIDEARKQGDLEAWRFLVILQLVQAGEETQVGAPARAETRCEPFTMKMLKDIKEGVKQYGSNSPYIRTLLDSIAHGNRLTPYDWEILAKSSLSSSQYLQFKTWWIDGVQEQVRKNQATKPTVNIDADQLLGTGPNWSTINQQSVMQNEAIEQ

SEQ ID NO: 32642 - protein, 26 aa, Homo sapiens
  MAP TO AP000345.1; EXPRESSED IN HELA, SIGNAL = 1.5; EXPRESSED IN BONE MARROW, SIGNAL = 0.84; SWISSPROT HIT: P10263, EVALUE 6.10e-01
VDRVVHCMQSLMKPENRAILRHGGSW

SEQ ID NO: 32643 - protein, 36 aa, Homo sapiens
  MAP TO AF004877.1; EXPRESSED IN BONE MARROW, SIGNAL = 1.1; EXPRESSED IN PLACENTA, SIGNAL = 2.6; EXPRESSED IN HEART, SIGNAL = 1.5; EXPRESSED IN BRAIN, SIGNAL = 0.93; EXPRESSED IN FETAL LIVER, SIGNAL = 2.1; EXPRESSED IN LUNG, SIGNAL = 2.7; SWISSPROT HIT: O46392, EVALUE 1.00e-03
GEPGVVGAVGTAGPSGPSGLPGERGAAGIPGGKGEK

SEQ ID NO: 32644 - protein, 61 aa, Homo sapiens
  MAP TO AC004171.1; EXPRESSED IN BONE MARROW, SIGNAL = 0.47; EXPRESSED IN BRAIN, SIGNAL = 0.62; SWISSPROT HIT: P93527, EVALUE 3.60e+00
DIHTHVPPVDLGTDLPNLSQPLPISAWTTRVPEGCPTTATAITHTTSTAKGLKNSTSYLNY

SEQ ID NO: 32645 - protein, 59 aa, Homo sapiens
  MAP TO AC004171.1; EXPRESSED IN BONE MARROW, SIGNAL = 0.47; EXPRESSED IN BRAIN, SIGNAL = 0.62; SWISSPROT HIT: P45038, EVALUE 8.00e+00
LTSTLMCLLWIWELTCPTCHSHCQYQHGLHGSQRAVPPLLLPSPTPHPLPKGSRIQLHT

SEQ ID NO: 32646 - protein, 19 aa, Homo sapiens
  MAP TO AC010327.5; EXPRESSED IN FETAL LIVER, SIGNAL = 0.58; EXPRESSED IN BONE MARROW, SIGNAL = 0.52; EXPRESSED IN HEART, SIGNAL = 1.1
TWWTCGRSSCRDSTPGSGS

SEQ ID NO: 32647 - protein, 85 aa, Homo sapiens
  MAP TO AC010327.5; EXPRESSED IN FETAL LIVER, SIGNAL = 0.58; EXPRESSED IN BONE MARROW, SIGNAL = 0.52; EXPRESSED IN HEART, SIGNAL = 1.1; SWISSPROT HIT: P97290, EVALUE 8.20e-01
YLVDVRQEQLQGFNTRVRELAQAAGFAPQTGARPSETFARFCKSQESALGNTVPAVEPGTPPLDILAQPLEASNPALEGLTQPLQ

SEQ ID NO: 32648 - protein, 24 aa, Homo sapiens
  MAP TO AL109944.19; EXPRESSED IN FETAL LIVER, SIGNAL = 1.2; EXPRESSED IN BONE MARROW, SIGNAL = 1.3; EXPRESSED IN PLACENTA, SIGNAL = 1.4
CQSFPRETVNSTWGTPKREMIKKG

SEQ ID NO: 32649 - protein, 18 aa, Homo sapiens
  MAP TO AF002991.1; EXPRESSED IN HEART, SIGNAL = 1.8; EXPRESSED IN BRAIN, SIGNAL = 0.99; EXPRESSED IN BONE MARROW, SIGNAL = 0.96; EXPRESSED IN PLACENTA, SIGNAL = 0.87
ITLTYTLCVSSLSSSSPL

SEQ ID NO: 32650 - protein, 29 aa, Homo sapiens
  MAP TO AF002991.1; EXPRESSED IN HEART, SIGNAL = 1.8; EXPRESSED IN BRAIN, SIGNAL = 0.99; EXPRESSED IN BONE MARROW, SIGNAL = 0.96; EXPRESSED IN PLACENTA, SIGNAL = 0.87
NADIYTLCVFPFILIAFVKGKEISGPPNY

SEQ ID NO: 32651 - protein, 51 aa, Homo sapiens
  MAP TO AC008727.5; EXPRESSED IN FETAL LIVER, SIGNAL = 0.54; EXPRESSED IN BONE MARROW, SIGNAL = 0.7; EXPRESSED IN PLACENTA, SIGNAL = 0.7; SWISSPROT HIT: Q08462, EVALUE 3.00e-14
VSIQLSNWTVVIASQLLSKPKFSGVEKIKTIGSTYMAATGLSAVPSQEHSQ

SEQ ID NO: 32652 - protein, 62 aa, Homo sapiens
  MAP TO AC005578.1; EXPRESSED IN BONE MARROW, SIGNAL = 0.99; EXPRESSED IN PLACENTA, SIGNAL = 0.54; EXPRESSED IN HEART, SIGNAL = 0.98; EXPRESSED IN BRAIN, SIGNAL = 1.2; SWISSPROT HIT: Q03017, EVALUE 2.00e-03
TALMLACEGASPETVEVLLQGGAQPGITDALGQDAAHYGALAGDKLILHLLQEAAQRPSPPS

SEQ ID NO: 32653 - protein, 30 aa, Homo sapiens
  MAP TO AC008518.3; EXPRESSED IN BONE MARROW, SIGNAL =   2; EXPRESSED IN PLACENTA, SIGNAL = 4.5; EXPRESSED IN HEART, SIGNAL = 3.9; EXPRESSED IN BRAIN, SIGNAL = 4.1
AQSLSSLSAGSNKKQNKIKNAESSSLKKSN

SEQ ID NO: 32654 - protein, 92 aa, Homo sapiens
  MAP TO AC004171.1; EXPRESSED IN BONE MARROW, SIGNAL = 0.41; EXPRESSED IN PLACENTA, SIGNAL = 0.55; EXPRESSED IN BRAIN, SIGNAL = 0.56; SWISSPROT HIT: Q9PK91, EVALUE 6.50e+00
SHREVKCHHGEQHGLRAAQEVEEMKLAYASQERNCFVCREKVLQHFWQCHRRVTDIQVGQVSQEEIHKGMESRIGDDNHQNGSIPSHTDEVD

SEQ ID NO: 32655 - protein, 25 aa, Homo sapiens
  MAP TO AC004171.1; EXPRESSED IN BONE MARROW, SIGNAL = 0.41; EXPRESSED IN PLACENTA, SIGNAL = 0.55; EXPRESSED IN BRAIN, SIGNAL = 0.56
DGYGWNHRSSSEKSLRSAAGHGKNQ

SEQ ID NO: 32656 - protein, 38 aa, Homo sapiens
  MAP TO AC018757.4; EXPRESSED IN HEART, SIGNAL = 3.4; EXPRESSED IN BRAIN, SIGNAL = 2.1; EXPRESSED IN HELA, SIGNAL = 2.7; EXPRESSED IN BONE MARROW, SIGNAL = 1.6; EXPRESSED IN PLACENTA, SIGNAL = 1.8
ANESPTAASVQLCVQRAGTCLPWSSSKHRRHFQCSISV

SEQ ID NO: 32657 - protein, 31 aa, Homo sapiens
  MAP TO AL031592.1; EXPRESSED IN HEART, SIGNAL = 1.1; EXPRESSED IN LUNG, SIGNAL = 1.7; EXPRESSED IN BRAIN, SIGNAL = 1.2; EXPRESSED IN BONE MARROW, SIGNAL = 1.5; EXPRESSED IN PLACENTA, SIGNAL = 0.99
NRRQSHDSSPCPSDPGYSSVHQTKVSQNMAS

SEQ ID NO: 32658 - protein, 19 aa, Homo sapiens
  MAP TO AC022517.1; EXPRESSED IN HEART, SIGNAL = 7.7; EXPRESSED IN BRAIN, SIGNAL = 3.4; EXPRESSED IN LUNG, SIGNAL =   8; EXPRESSED IN HELA, SIGNAL = 4.8; EXPRESSED IN FETAL LIVER, SIGNAL = 7.6; EXPRESSED IN BONE MARROW, SIGNAL = 2.4
SMSVSWRRGLGNTAQCSSE

SEQ ID NO: 32659 - protein, 50 aa, Homo sapiens
  MAP TO AC022073.13; EXPRESSED IN BONE MARROW, SIGNAL = 0.91; EXPRESSED IN PLACENTA, SIGNAL = 0.69; EXPRESSED IN BRAIN, SIGNAL = 0.69; EXPRESSED IN FETAL LIVER, SIGNAL = 0.7; EXPRESSED IN HELA, SIGNAL = 0.64; SWISSPROT HIT: Q19264, EVALUE 3.00e-12
IGFKPAGGIRSAKDSLAWLSLVKEELGDEWLKPELFRIGASTLLSDIERQ

SEQ ID NO: 32660 - protein, 20 aa, Homo sapiens
  MAP TO AC022073.13; EXPRESSED IN BONE MARROW, SIGNAL = 0.91; EXPRESSED IN PLACENTA, SIGNAL = 0.69; EXPRESSED IN BRAIN, SIGNAL = 0.69; EXPRESSED IN FETAL LIVER, SIGNAL = 0.7; EXPRESSED IN HELA, SIGNAL = 0.64
GLNQQEASAVQRIPLLGSLL

SEQ ID NO: 32661 - protein, 54 aa, Homo sapiens
  MAP TO AC006131.1; EXPRESSED IN BONE MARROW, SIGNAL = 0.49; EXPRESSED IN FETAL LIVER, SIGNAL = 0.38; EXPRESSED IN BRAIN, SIGNAL = 0.66; SWISSPROT HIT: Q01295, EVALUE 2.10e+00
PAKQQDSQLWPIPYLWASSERVSYSGQHARVGTGAASLNTCPQFLNAPAEMEPS

SEQ ID NO: 32662 - protein, 55 aa, Homo sapiens
  MAP TO AC006131.1; EXPRESSED IN BONE MARROW, SIGNAL = 0.49; EXPRESSED IN FETAL LIVER, SIGNAL = 0.38; EXPRESSED IN BRAIN, SIGNAL = 0.66; SWISSPROT HIT: P30554, EVALUE 6.20e+00
PSQAAGLTALAHPLSLGFLREGVLQWSACPRGDRSSFSEHMSPVSQCPCRDGTFQ

SEQ ID NO: 32663 - protein, 35 aa, Homo sapiens
  MAP TO AC005570.1; EXPRESSED IN LUNG, SIGNAL = 1.2; EXPRESSED IN BRAIN, SIGNAL = 0.45; EXPRESSED IN BONE MARROW, SIGNAL = 0.77; EXPRESSED IN PLACENTA, SIGNAL = 0.39
MLNTAEELHRDHITAPIWKHSHHTLSNQHTKTQLQ

SEQ ID NO: 32664 - protein, 34 aa, Homo sapiens
  MAP TO AC005570.1; EXPRESSED IN LUNG, SIGNAL = 1.2; EXPRESSED IN BRAIN, SIGNAL = 0.45; EXPRESSED IN BONE MARROW, SIGNAL = 0.77; EXPRESSED IN PLACENTA, SIGNAL = 0.39
CSTQLKSCTETISLHPSGNTATTPFPTSTLRPNC

SEQ ID NO: 32665 - protein, 69 aa, Homo sapiens
  MAP TO AC009145.4; EXPRESSED IN BRAIN, SIGNAL = 0.83; EXPRESSED IN HELA, SIGNAL = 1.1; EXPRESSED IN BONE MARROW, SIGNAL = 0.63; EXPRESSED IN PLACENTA, SIGNAL = 1.2; SWISSPROT HIT: P56206, EVALUE 2.00e+00
SMVISIRSIEEIESMGMACIIKPPHYQQGSTGRCMCLLQRSITFQEFPSGSVRIFILMKPELAGRWRAT

SEQ ID NO: 32666 - protein, 26 aa, Homo sapiens
  MAP TO AL121821.5; EXPRESSED IN HELA, SIGNAL = 1.1; EXPRESSED IN BRAIN, SIGNAL = 1.1; EXPRESSED IN BONE MARROW, SIGNAL = 1.1; EXPRESSED IN PLACENTA, SIGNAL = 0.9
CCRFSPWTSQKPQLSTSRDRKLQGKR

SEQ ID NO: 32667 - protein, 27 aa, Homo sapiens
  MAP TO AL121821.5; EXPRESSED IN HELA, SIGNAL = 1.1; EXPRESSED IN BRAIN, SIGNAL = 1.1; EXPRESSED IN BONE MARROW, SIGNAL = 1.1; EXPRESSED IN PLACENTA, SIGNAL = 0.9
LDTIKKKTSYSAQRCKVFGFLIQHFIL

SEQ ID NO: 32668 - protein, 68 aa, Homo sapiens
  MAP TO AC010485.4; EXPRESSED IN BONE MARROW, SIGNAL = 1.9; EXPRESSED IN PLACENTA, SIGNAL = 1.1; SWISSPROT HIT: P57058, EVALUE 1.60e+00
LKLEGAFDGHSAALPSMCPLQTPLHPSRLACMAPSLTSPPPDTARPSSLLSLSLGIYTSITVLVTLMF

SEQ ID NO: 32669 - protein, 23 aa, Homo sapiens
  MAP TO AC000077.2; EXPRESSED IN PLACENTA, SIGNAL = 0.43; EXPRESSED IN FETAL LIVER, SIGNAL = 0.62; EXPRESSED IN HELA, SIGNAL = 0.67; EXPRESSED IN BONE MARROW, SIGNAL = 0.49
YSAECRFIHIVACVRSSFLSKAE

SEQ ID NO: 32670 - protein, 39 aa, Homo sapiens
  MAP TO AC012082.6; EXPRESSED IN BONE MARROW, SIGNAL = 1.2; EXPRESSED IN PLACENTA, SIGNAL = 2.1
HTCARGVFPKPWTALPLWLSRVQSPQLLSRASVQGLQLF

SEQ ID NO: 32671 - protein, 34 aa, Homo sapiens
  MAP TO AC010209.13; EXPRESSED IN HELA, SIGNAL = 1.2; EXPRESSED IN BRAIN, SIGNAL = 1.1; EXPRESSED IN LUNG, SIGNAL = 1.5; EXPRESSED IN FETAL LIVER, SIGNAL = 1.4; EXPRESSED IN BONE MARROW, SIGNAL = 1.1
CPQIVQASGSTKPGFSPQQDRESTLVVELEGFQE

SEQ ID NO: 32672 - protein, 72 aa, Homo sapiens
  MAP TO AL118558.2; EXPRESSED IN BONE MARROW, SIGNAL = 1.5; EXPRESSED IN PLACENTA, SIGNAL = 2.6; EXPRESSED IN BRAIN, SIGNAL =   2; EXPRESSED IN FETAL LIVER, SIGNAL = 1.7; EXPRESSED IN LUNG, SIGNAL = 1.9; SWISSPROT HIT: Q9JHU4, EVALUE 1.00e-33
LNYADMLKRVEPLRNELQKLEDDAKDNQQKANEVEQMIRDLEASIARYKEEYAVLISEAQAIKADLAAVEAK

SEQ ID NO: 32673 - protein, 70 aa, Homo sapiens
  MAP TO AC010379.4; EXPRESSED IN BONE MARROW, SIGNAL = 1.1; EXPRESSED IN PLACENTA, SIGNAL = 0.69; EXPRESSED IN BRAIN, SIGNAL =   1; EXPRESSED IN FETAL LIVER, SIGNAL = 0.76; EXPRESSED IN LUNG, SIGNAL = 0.51; SWISSPROT HIT: P75610, EVALUE 1.60e+00
MASAVGMREKEDLGKGQVRQGDFFQSKNTVSRREAEQDGRIESSTDHPHSKDTKLTTIYVKNHLHKNQKS

SEQ ID NO: 32674 - protein, 71 aa, Homo sapiens
  MAP TO AF205588.1; EXPRESSED IN BONE MARROW, SIGNAL = 0.79; EXPRESSED IN LUNG, SIGNAL = 0.9; EXPRESSED IN HELA, SIGNAL = 0.51; SWISSPROT HIT: O67178, EVALUE 7.90e-01
MKDWKDDTTGTEDGVTVTEKAIEAIDPKTINSFWRKLYPDVVYDFTEFMTEPIKEIIKEIVDMAKRKKKKK

SEQ ID NO: 32675 - protein, 30 aa, Homo sapiens
  MAP TO AJ012008.1; EXPRESSED IN BRAIN, SIGNAL = 2.5; EXPRESSED IN BONE MARROW, SIGNAL = 2.5; EXPRESSED IN PLACENTA, SIGNAL = 4.4; EXPRESSED IN HEART, SIGNAL = 2.6
VRCGFSPICAVAHQKSPVRRPSTKPTVSWV

SEQ ID NO: 32676 - protein, 70 aa, Homo sapiens
  MAP TO AJ012008.1; EXPRESSED IN BRAIN, SIGNAL = 2.5; EXPRESSED IN BONE MARROW, SIGNAL = 2.5; EXPRESSED IN PLACENTA, SIGNAL = 4.4; EXPRESSED IN HEART, SIGNAL = 2.6; SWISSPROT HIT: O95867, EVALUE 7.00e-31
KMWVFSNLRCGTPEEPCQEAFNQTNRKLGLTYNTTCCNKDNCNSAGPRPTPALGLVFLTSLAGLGLWLLH

SEQ ID NO: 32677 - protein, 107 aa, Homo sapiens
  MAP TO AC000068.2; EXPRESSED IN HELA, SIGNAL = 1.8; EXPRESSED IN BONE MARROW, SIGNAL = 0.97; EXPRESSED IN PLACENTA, SIGNAL = 1.2; SWISSPROT HIT: P08775, EVALUE 4.60e-01
ERPQVELTFEETERRALLLKKWSLYKQQERKMERDTIRAMLEAQQEALEELQLESPKLHAEAIKRDPNLFPFEKEGPHYTPPIPNYQPPEGRYNDITKVYTQVEFKR

SEQ ID NO: 32678 - protein, 18 aa, Homo sapiens
  MAP TO AC000068.2; EXPRESSED IN HELA, SIGNAL = 1.8; EXPRESSED IN BONE MARROW, SIGNAL = 0.97; EXPRESSED IN PLACENTA, SIGNAL = 1.2
SGLRWSSPLRRLRGELCF

SEQ ID NO: 32679 - protein, 78 aa, Homo sapiens
  MAP TO AF207953.2; EXPRESSED IN FETAL LIVER, SIGNAL = 1.1; EXPRESSED IN BONE MARROW, SIGNAL = 0.55; SWISSPROT HIT: Q14541, EVALUE 7.00e-36
AKGLSDPVKIKNMRFQVQIGLEDYINDRQYDSRGRFGELLLLLPTLQSITWQMIEQIQFVKLFGMVKIDNLLQEMLLG

SEQ ID NO: 32680 - protein, 58 aa, Homo sapiens
  MAP TO AC005276.1; EXPRESSED IN BRAIN, SIGNAL = 3.8; EXPRESSED IN LUNG, SIGNAL = 4.5; EXPRESSED IN FETAL LIVER, SIGNAL = 4.3; EXPRESSED IN BONE MARROW, SIGNAL = 2.3; SWISSPROT HIT: P03356, EVALUE 2.00e-13
SDNGPAFTSQITQAVSQALGIQWNLHIPYSPQSSGKVERTNGPLKTHLTKLSHQFKKD

SEQ ID NO: 32681 - protein, 36 aa, Homo sapiens
  MAP TO AC005276.1; EXPRESSED IN BRAIN, SIGNAL = 3.8; EXPRESSED IN LUNG, SIGNAL = 4.5; EXPRESSED IN FETAL LIVER, SIGNAL = 4.3; EXPRESSED IN BONE MARROW, SIGNAL = 2.3
LIMDQPLLVKSRKQFLRLLVFSGTFISLTVLSLQER

SEQ ID NO: 32682 - protein, 69 aa, Homo sapiens
  MAP TO AL121784.2; EXPRESSED IN BRAIN, SIGNAL = 0.68; EXPRESSED IN FETAL LIVER, SIGNAL = 0.97; EXPRESSED IN HELA, SIGNAL = 0.78; EXPRESSED IN BONE MARROW, SIGNAL = 1.1; EXPRESSED IN PLACENTA, SIGNAL = 0.76; SWISSPROT HIT: Q09860, EVALUE 9.10e-01
EEELLAWSGSKPGRSPWVAGRTGRPSECSPAMTAKSASTSQAMTSPCRMCLLTASLTLPIPSSLPPSPT

SEQ ID NO: 32683 - protein, 42 aa, Homo sapiens
  MAP TO AF004877.1; EXPRESSED IN BONE MARROW, SIGNAL = 0.86; EXPRESSED IN PLACENTA, SIGNAL = 0.75; EXPRESSED IN BRAIN, SIGNAL = 0.65
ISFYEAEDFTELENLFTPLELFAKALIVNTFLAHELNLRHKY

SEQ ID NO: 32684 - protein, 43 aa, Homo sapiens
  MAP TO AF196972.1; EXPRESSED IN BRAIN, SIGNAL = 1.8; EXPRESSED IN BONE MARROW, SIGNAL = 1.9; EXPRESSED IN PLACENTA, SIGNAL =   2
GDNFTVCMETITACLWGPLSLWVVIAFLRQHPLRFILQLVVSV

SEQ ID NO: 32685 - protein, 23 aa, Homo sapiens
  MAP TO AF196972.1; EXPRESSED IN BRAIN, SIGNAL = 1.8; EXPRESSED IN BONE MARROW, SIGNAL = 1.9; EXPRESSED IN PLACENTA, SIGNAL =   2
VTTSQCAWKPSQLACGDHSACGW

SEQ ID NO: 32686 - protein, 52 aa, Homo sapiens
  MAP TO AC006181.1; EXPRESSED IN HEART, SIGNAL = 1.4; EXPRESSED IN BRAIN, SIGNAL = 1.8; EXPRESSED IN BONE MARROW, SIGNAL = 1.8; SWISSPROT HIT: P34706, EVALUE 4.80e+00
MAQHPEPEQDGPTEIPGRAGGEDHTEPGTGRELVAVMALPSAGAGIRYSHCK

SEQ ID NO: 32687 - protein, 143 aa, Homo sapiens
  MAP TO AC004189.1; EXPRESSED IN BONE MARROW, SIGNAL =   1; EXPRESSED IN PLACENTA, SIGNAL = 0.9; EXPRESSED IN BRAIN, SIGNAL = 0.78; SWISSPROT HIT: P19474, EVALUE 7.00e-26
MASAASVTSLADEVNCPICQGTLREPVTIDCGHNFCRACLTRYCEIPGPDLEESPTCPLCKEPFRPGSFRPNWQLANVVENIERLQLVSTLGLGEEDVCQEHGEKIYFFCEDDEMQLCVVCREAGEHATHTMRFLEDAAAPYR

SEQ ID NO: 32688 - protein, 65 aa, Homo sapiens
  MAP TO AC011537.6; EXPRESSED IN BONE MARROW, SIGNAL = 2.1; SWISSPROT HIT: P78329, EVALUE 3.00e-24
RPSEYIATILELSALVEKRNQHILQHMDFLYYLSHDGWRFRRACRLVHDFTDAVIQERRHTLPTQ

SEQ ID NO: 32689 - protein, 54 aa, Homo sapiens
  MAP TO AC003963.1; EXPRESSED IN BONE MARROW, SIGNAL = 0.8; EXPRESSED IN PLACENTA, SIGNAL = 0.83; EXPRESSED IN HEART, SIGNAL = 0.92; EXPRESSED IN HELA, SIGNAL = 0.86; SWISSPROT HIT: Q99558, EVALUE 8.00e-30
DYIPGTETHMAPEVVLGRSCDAKVDVWSSCCMMLHMLNGCHPWTQFFRGPLCLK

SEQ ID NO: 32690 - protein, 32 aa, Homo sapiens
  MAP TO AC003963.1; EXPRESSED IN BONE MARROW, SIGNAL = 0.8; EXPRESSED IN PLACENTA, SIGNAL = 0.83; EXPRESSED IN HEART, SIGNAL = 0.92; EXPRESSED IN HELA, SIGNAL = 0.86
GTTSLAQRPTWLRRWCWAGAATPRWMSGAAAV

SEQ ID NO: 32691 - protein, 22 aa, Homo sapiens
  MAP TO AC011718.2; EXPRESSED IN BONE MARROW, SIGNAL = 0.63; EXPRESSED IN PLACENTA, SIGNAL = 0.59; EXPRESSED IN BRAIN, SIGNAL = 0.49; SWISSPROT HIT: Q59640, EVALUE 8.80e+00
GGRWGRIAMGRQAELRMWKGIQ

SEQ ID NO: 32692 - protein, 99 aa, Homo sapiens
  MAP TO AC026743.3; EXPRESSED IN BONE MARROW, SIGNAL = 0.56; EXPRESSED IN PLACENTA, SIGNAL = 1.8; EXPRESSED IN HEART, SIGNAL = 2.8; EXPRESSED IN BRAIN, SIGNAL = 1.7; EXPRESSED IN FETAL LIVER, SIGNAL = 2.6; SWISSPROT HIT: P17139, EVALUE 1.10e+00
GVLQVQGPEGDSVVGAEGEPGTKPDDEAGREVGLVPMLSGMGSPANEVTQCQVFGICLVSHKIMSMSSIQVVALNSGSFIFIAILLHCVTPSQLINSTV

SEQ ID NO: 32693 - protein, 66 aa, Homo sapiens
  MAP TO AC016940.7; EXPRESSED IN BONE MARROW, SIGNAL = 1.1; EXPRESSED IN PLACENTA, SIGNAL = 1.1; EXPRESSED IN HEART, SIGNAL = 1.7; SWISSPROT HIT: P56931, EVALUE 7.80e+00
TVICLPEGRLPEEVAPSGLWKAIGVAASPSRTTATTSVVPSVASLQSPPPVLQAPKSSPVFNQIPV

SEQ ID NO: 32694 - protein, 122 aa, Homo sapiens
  MAP TO AC044786.2; EXPRESSED IN FETAL LIVER, SIGNAL = 8.6; EXPRESSED IN HELA, SIGNAL = 6.6; EXPRESSED IN BONE MARROW, SIGNAL = 3.5; EXPRESSED IN HEART, SIGNAL = 5.2; EXPRESSED IN LUNG, SIGNAL = 3.7; SWISSPROT HIT: P45541, EVALUE 5.70e+00
WCHGLGPGPCCLCSLGTWCPVSQLWLKVANIQLRPLLQRVQAPSLGSLHMVLGLWEHRIQELRFGNLHLDFRGFMEMLECPGRGVLQGWSLHGETLLGQCGMEIWGGSPHTVYPLGQCLVEL

SEQ ID NO: 32695 - protein, 148 aa, Homo sapiens
  MAP TO AC000094.3; EXPRESSED IN BONE MARROW, SIGNAL = 0.72; EXPRESSED IN PLACENTA, SIGNAL =  12; EXPRESSED IN HEART, SIGNAL = 1.4; EXPRESSED IN LUNG, SIGNAL =   2; EXPRESSED IN FETAL LIVER, SIGNAL = 4.7; SWISSPROT HIT: P05783, EVALUE 1.00e-57
IEESTTVVITQSTEIRAAEITLTELRCPVQSLEIGLDLMRNLKISLENSLREVEACYTTQMEQLNRVLLYLESELAQTWAEGQRQAQEYEAWNIQVNLEAEITTYHRLLEDGEDFNLGEALDSSNSMQTIQKTTTCRIVDGKVVFETN

SEQ ID NO: 32696 - protein, 79 aa, Homo sapiens
  MAP TO AL118558.2; EXPRESSED IN HEART, SIGNAL = 1.5; EXPRESSED IN LUNG, SIGNAL = 3.1; EXPRESSED IN HELA, SIGNAL = 2.4; EXPRESSED IN BONE MARROW, SIGNAL = 0.71; SWISSPROT HIT: Q9JHU4, EVALUE 4.00e-37
VPGLFEGDEYATLMTQCKEGAQKEGLMLDSHEELYKWFTSQVIRNLHVVFTMNPSSEGLKDRAATSPALFNRYVGLYLA

SEQ ID NO: 32697 - protein, 41 aa, Homo sapiens
  MAP TO AC004172.1; EXPRESSED IN HELA, SIGNAL = 0.75; EXPRESSED IN BONE MARROW, SIGNAL = 0.44
RVSLQGLGQHLVGTGDHQGSAQLRSQSLVSAPGFAGSTEGN

SEQ ID NO: 32698 - protein, 67 aa, Homo sapiens
  MAP TO AC010205.5; EXPRESSED IN FETAL LIVER, SIGNAL = 1.5; EXPRESSED IN BONE MARROW, SIGNAL = 0.64; EXPRESSED IN PLACENTA, SIGNAL = 1.3; SWISSPROT HIT: Q61982, EVALUE 4.00e-02
NSGGSRYIAGGGGTGSIGVGQPWQFGGGINSVSYCNQGCANSWLADKFCDQACNVLSCGFDAGDCGQ

SEQ ID NO: 32699 - protein, 133 aa, Homo sapiens
  MAP TO AC009086.5; EXPRESSED IN BONE MARROW, SIGNAL = 0.78; EXPRESSED IN PLACENTA, SIGNAL = 1.5; EXPRESSED IN FETAL LIVER, SIGNAL = 2.3; SWISSPROT HIT: P19171, EVALUE 1.50e+00
HGEEMLQNLPQEENSPWVKGPSQPALFFPTKRWDHLVWEVEAGWENNPSPGFLWLWSRAEEEDGASELSEPWPCEVSEQANGAAGGDLVPAPGGRPEASIKAKATYRSNGSLNREEGLAPAPSGPARTIVNTG

SEQ ID NO: 32700 - protein, 19 aa, Homo sapiens
  MAP TO AC018359.7; EXPRESSED IN PLACENTA, SIGNAL = 0.55; EXPRESSED IN BRAIN, SIGNAL = 0.64; EXPRESSED IN BONE MARROW, SIGNAL = 0.86
RCRSRPTDSGRPAGHQPAD

SEQ ID NO: 32701 - protein, 37 aa, Homo sapiens
  MAP TO AC010316.5; EXPRESSED IN BONE MARROW, SIGNAL = 1.7; EXPRESSED IN LUNG, SIGNAL = 3.7
SNTGCTFCHLMPVQSVLLLRTFGILMRPAREKTLRSQ

SEQ ID NO: 32702 - protein, 63 aa, Homo sapiens
  MAP TO AC010316.5; EXPRESSED IN BONE MARROW, SIGNAL = 1.7; EXPRESSED IN LUNG, SIGNAL = 3.7; SWISSPROT HIT: Q63191, EVALUE 1.20e+00
KYRLHILSLNASTICVTPKDFWDFDETCEGEDTEKPVICKHLLLFPHHLWDISAVVSKWQIIN

SEQ ID NO: 32703 - protein, 25 aa, Homo sapiens
  MAP TO AL050328.24; EXPRESSED IN BRAIN, SIGNAL = 5.7; EXPRESSED IN LUNG, SIGNAL = 1.2; EXPRESSED IN HELA, SIGNAL = 0.82; EXPRESSED IN BONE MARROW, SIGNAL = 0.86; EXPRESSED IN PLACENTA, SIGNAL = 0.65
WFISTEMARTKMETRHLNIGAGQSC

SEQ ID NO: 32704 - protein, 115 aa, Homo sapiens
  MAP TO AL050328.24; EXPRESSED IN BRAIN, SIGNAL = 5.7; EXPRESSED IN LUNG, SIGNAL = 1.2; EXPRESSED IN HELA, SIGNAL = 0.82; EXPRESSED IN BONE MARROW, SIGNAL = 0.86; EXPRESSED IN PLACENTA, SIGNAL = 0.65; SWISSPROT HIT: Q16653, EVALUE 3.00e-64
QFRVIGPRHPIRALVGDEVELPCRISPGKNATGMEVGWYRPPFSRVVHLYRNGKDQDGDQAPEYRGRTELLKDAIGEGKVTLRIRNVRFSDEGGFTCFFRDHSYQEEAAMELKVE

SEQ ID NO: 32705 - protein, 59 aa, Homo sapiens
  MAP TO AC013417.4; EXPRESSED IN BONE MARROW, SIGNAL = 1.4; EXPRESSED IN PLACENTA, SIGNAL = 2.1; EXPRESSED IN HEART, SIGNAL = 1.5; EXPRESSED IN LUNG, SIGNAL = 1.7; EXPRESSED IN FETAL LIVER, SIGNAL = 1.3; EXPRESSED IN BRAIN, SIGNAL = 1.5
RDIYQTFYLASAAPSSLHPSSPEESPLLLWVSSGEDLGTLSSATSPSWYGSSLMTSPPP

SEQ ID NO: 32706 - protein, 22 aa, Homo sapiens
  MAP TO AC007559.3; EXPRESSED IN HELA, SIGNAL = 1.8; EXPRESSED IN BRAIN, SIGNAL = 1.7; EXPRESSED IN BONE MARROW, SIGNAL = 1.7; EXPRESSED IN PLACENTA, SIGNAL = 0.79; EXPRESSED IN HEART, SIGNAL = 1.2
ITRAALTRWTRVSRMSRSSVVE

SEQ ID NO: 32707 - protein, 127 aa, Homo sapiens
  MAP TO AC007559.3; EXPRESSED IN HELA, SIGNAL = 1.8; EXPRESSED IN BRAIN, SIGNAL = 1.7; EXPRESSED IN BONE MARROW, SIGNAL = 1.7; EXPRESSED IN PLACENTA, SIGNAL = 0.79; EXPRESSED IN HEART, SIGNAL = 1.2; SWISSPROT HIT: Q58015, EVALUE 1.70e+00
ISYKNPKIFNRNNQSCSDAVDKGVQNVKELCGGMKDDPRASALTMVTLQRGPAILTQEVITATQLPEAVSKCKSTARNLTLCSQREPSSNIKSWNPGHQKGTTPGLASSLSQDLTTDVSILQCDCFP

SEQ ID NO: 32708 - protein, 49 aa, Homo sapiens
  MAP TO AJ250235.1; EXPRESSED IN BRAIN, SIGNAL = 0.82; EXPRESSED IN BONE MARROW, SIGNAL =   2; SWISSPROT HIT: P22830, EVALUE 1.00e-22
KLAPFIAKRRTPKIQEQYRRIGGGSPIKIWTSKQGEGMVKLLDELSPNT

SEQ ID NO: 32709 - protein, 77 aa, Homo sapiens
  MAP TO AC004186.1; EXPRESSED IN BONE MARROW, SIGNAL = 0.76; EXPRESSED IN LUNG, SIGNAL = 1.5; EXPRESSED IN HELA, SIGNAL = 1.9; SWISSPROT HIT: P14373, EVALUE 7.50e+00
KKLQDQRQYIVAEFEQGHQFLREREEHLLEQLAKLEQELTEGREKFKSRGVGELARLALVISELEGKAQQPAAELMQ

SEQ ID NO: 32710 - protein, 20 aa, Homo sapiens
  MAP TO AC004186.1; EXPRESSED IN BONE MARROW, SIGNAL = 0.76; EXPRESSED IN LUNG, SIGNAL = 1.5; EXPRESSED IN HELA, SIGNAL = 1.9
RSSRTRGSTLWLSLSRVISS

SEQ ID NO: 32711 - protein, 27 aa, Homo sapiens
  MAP TO AC007759.1; EXPRESSED IN BONE MARROW, SIGNAL = 2.1; EXPRESSED IN PLACENTA, SIGNAL = 1.4; EXPRESSED IN HEART, SIGNAL = 1.1; EXPRESSED IN LUNG, SIGNAL = 2.7
QDKEKEEEEEEEEEKKKEEEEEEKNKA

SEQ ID NO: 32712 - protein, 29 aa, Homo sapiens
  MAP TO AC007759.1; EXPRESSED IN BONE MARROW, SIGNAL = 2.1; EXPRESSED IN PLACENTA, SIGNAL = 1.4; EXPRESSED IN HEART, SIGNAL = 1.1; EXPRESSED IN LUNG, SIGNAL = 2.7
LDDRARQRKRRRRRRGRREEEGGGGGGEK

SEQ ID NO: 32713 - protein, 33 aa, Homo sapiens
  MAP TO AC004177.2; EXPRESSED IN BRAIN, SIGNAL = 0.72; EXPRESSED IN BONE MARROW, SIGNAL = 0.42; EXPRESSED IN PLACENTA, SIGNAL = 0.46; SWISSPROT HIT: Q43502, EVALUE 5.00e+00
VCPGSQGSPPWPSFSQCSLGSWIGTTGQRPQDK

SEQ ID NO: 32714 - protein, 35 aa, Homo sapiens
  MAP TO AC008775.5; EXPRESSED IN BONE MARROW, SIGNAL = 0.46; EXPRESSED IN PLACENTA, SIGNAL = 0.64
MHEEAKVFCTAQLGHSGARVCHSHHSLYERTLRNH

SEQ ID NO: 32715 - protein, 38 aa, Homo sapiens
  MAP TO AC010238.4; EXPRESSED IN FETAL LIVER, SIGNAL = 0.52; EXPRESSED IN BRAIN, SIGNAL = 1.2; EXPRESSED IN HELA, SIGNAL = 0.75; EXPRESSED IN BONE MARROW, SIGNAL = 1.1; EXPRESSED IN PLACENTA, SIGNAL = 0.94; EXPRESSED IN HEART, SIGNAL = 1.5
AQEAGQQCFLGRVSCPGVWADVWPQALPSRGNAIWKKW

SEQ ID NO: 32716 - protein, 38 aa, Homo sapiens
  MAP TO AC010238.4; EXPRESSED IN FETAL LIVER, SIGNAL = 0.52; EXPRESSED IN BRAIN, SIGNAL = 1.2; EXPRESSED IN HELA, SIGNAL = 0.75; EXPRESSED IN BONE MARROW, SIGNAL = 1.1; EXPRESSED IN PLACENTA, SIGNAL = 0.94; EXPRESSED IN HEART, SIGNAL = 1.5
EPKKLVNSASLAESPAQASGQMCGHRLCQAGGMPFGRS

SEQ ID NO: 32717 - protein, 39 aa, Homo sapiens
  MAP TO AC004789.1; EXPRESSED IN BONE MARROW, SIGNAL = 0.88; EXPRESSED IN PLACENTA, SIGNAL =   1
ATRRRSAPCASTHWQPMCWPRPPMTSLFASGTFRLELIG

SEQ ID NO: 32718 - protein, 47 aa, Homo sapiens
  MAP TO AC004789.1; EXPRESSED IN BONE MARROW, SIGNAL = 0.88; EXPRESSED IN PLACENTA, SIGNAL =   1; SWISSPROT HIT: P57737, EVALUE 1.00e-21
HTEKICSLRFHPLAANVLASSSYDLTVRIWDLQAGADRLKLQGHQDQ

SEQ ID NO: 32719 - protein, 76 aa, Homo sapiens
  MAP TO AC008546.5; EXPRESSED IN BRAIN, SIGNAL = 1.1; EXPRESSED IN BONE MARROW, SIGNAL = 0.66; EXPRESSED IN PLACENTA, SIGNAL = 1.5; SWISSPROT HIT: P53882, EVALUE 2.20e+00
GQVIFKKLWEMSGRNFVFTPDLPNHSSLSQLVCFSLTSAISEVFSFSVCSEGWHQPHLKPTCVRKQMTTETFNVTF

SEQ ID NO: 32720 - protein, 47 aa, Homo sapiens
  MAP TO AC005567.1; EXPRESSED IN HELA, SIGNAL = 0.57; EXPRESSED IN FETAL LIVER, SIGNAL = 0.64; EXPRESSED IN BONE MARROW, SIGNAL = 0.68; SWISSPROT HIT: O15360, EVALUE 2.00e-20
LFVMLSAEELVGHLQEVLETQEVHWQRVLSFVSALVVCFPEAQQLLE

SEQ ID NO: 32721 - protein, 48 aa, Homo sapiens
  MAP TO AC007782.20; EXPRESSED IN BRAIN, SIGNAL = 0.85; EXPRESSED IN BONE MARROW, SIGNAL = 0.95
EFSRRKRSKSEDMDNVQSKRRRYMEEEYEAEFQVKITAKGDINQKLQK

SEQ ID NO: 32722 - protein, 34 aa, Homo sapiens
  MAP TO AC007782.20; EXPRESSED IN BRAIN, SIGNAL = 0.85; EXPRESSED IN BONE MARROW, SIGNAL = 0.95
MNFLDENVLNQKTWTMYSLNVVDIWKKNMRQNFK

SEQ ID NO: 32723 - protein, 64 aa, Homo sapiens
  MAP TO AL118558.2; EXPRESSED IN LUNG, SIGNAL = 2.6; EXPRESSED IN FETAL LIVER, SIGNAL = 2.1; EXPRESSED IN BONE MARROW, SIGNAL = 1.5; SWISSPROT HIT: P98161, EVALUE 2.50e+00
CPSAENGLRGRPRCLRLKWRRTRWQPLMSSCQRWTQSATKPSCTLGWPNTSPWSCVALLGLARP

SEQ ID NO: 32724 - protein, 78 aa, Homo sapiens
  MAP TO AL118558.2; EXPRESSED IN LUNG, SIGNAL = 2.6; EXPRESSED IN FETAL LIVER, SIGNAL = 2.1; EXPRESSED IN BONE MARROW, SIGNAL = 1.5; SWISSPROT HIT: Q9JHU4, EVALUE 4.00e-41
VSISGEWSPWQAKVPQIEVETHKVAAPDVVVPTLDTVRHEALLYTWLAEHKPLVLCGPPGSGKTMTLFSALRALPDME

SEQ ID NO: 32725 - protein, 60 aa, Homo sapiens
  MAP TO AC018427.3; EXPRESSED IN BRAIN, SIGNAL = 1.2; EXPRESSED IN HELA, SIGNAL = 1.1; EXPRESSED IN BONE MARROW, SIGNAL = 1.1; EXPRESSED IN PLACENTA, SIGNAL = 1.1; SWISSPROT HIT: P31695, EVALUE 4.20e-01
FQVHCWPDYNQQRCHQDEAQVHLGLSGHSTVSPDANCLPAPGYDSPVNPAPSQLTSEHHQ

SEQ ID NO: 32726 - protein, 102 aa, Homo sapiens
  MAP TO AC013737.4; EXPRESSED IN BRAIN, SIGNAL = 1.6; EXPRESSED IN LUNG, SIGNAL = 2.1; EXPRESSED IN BONE MARROW, SIGNAL = 0.97; EXPRESSED IN PLACENTA, SIGNAL = 1.3; EXPRESSED IN HEART, SIGNAL = 1.3; SWISSPROT HIT: P10264, EVALUE 5.00e-08
DQEEPAQKEKRDQRKTAALVMALRQTYLAGSERTENGAGQSPSGACYQCGLQGHLKKGCPMRNKLPPHPCPLCRGNHWKAHCPRGQRFSGPEAPNQMIQQQD

SEQ ID NO: 32727 - protein, 42 aa, Homo sapiens
  MAP TO AC003005.1; EXPRESSED IN HELA, SIGNAL = 0.78; EXPRESSED IN BONE MARROW, SIGNAL = 0.44; EXPRESSED IN PLACENTA, SIGNAL = 0.7; SWISSPROT HIT: O75820, EVALUE 2.00e-09
GYVTFEDVAVYFSQEEWRLLDDAQRLLYRNVMLENFTLLASL

SEQ ID NO: 32728 - protein, 19 aa, Homo sapiens
  MAP TO AC005862.1; EXPRESSED IN BONE MARROW, SIGNAL = 0.72; EXPRESSED IN PLACENTA, SIGNAL = 1.3; EXPRESSED IN HEART, SIGNAL = 1.4; EXPRESSED IN FETAL LIVER, SIGNAL = 0.74
WPAVQILAPGTKLCFLVWR

SEQ ID NO: 32729 - protein, 62 aa, Homo sapiens
  MAP TO AC006182.1; EXPRESSED IN BRAIN, SIGNAL = 1.4; EXPRESSED IN BONE MARROW, SIGNAL = 1.1; EXPRESSED IN PLACENTA, SIGNAL = 1.5; SWISSPROT HIT: O06208, EVALUE 6.10e+00
AIPRHSRRELSKKPVFPTVLRVTAWGFLVPFSWGGLGSNLPLREPLVGAAGTRGKSLAAAGK

SEQ ID NO: 32730 - protein, 21 aa, Homo sapiens
  MAP TO AC006182.1; EXPRESSED IN BRAIN, SIGNAL = 1.4; EXPRESSED IN BONE MARROW, SIGNAL = 1.1; EXPRESSED IN PLACENTA, SIGNAL = 1.5
PSPDIAGGSCPKSLCFLLCLG

SEQ ID NO: 32731 - protein, 38 aa, Homo sapiens
  MAP TO AC020923.4; EXPRESSED IN LUNG, SIGNAL = 2.2; EXPRESSED IN BRAIN, SIGNAL = 1.4; EXPRESSED IN BONE MARROW, SIGNAL = 2.1; EXPRESSED IN PLACENTA, SIGNAL = 1.8; SWISSPROT HIT: P20810, EVALUE 1.00e-15
PKSLPKQASDTGSNDAHNKKAVSRSAEQQPSEKSTEPK

SEQ ID NO: 32732 - protein, 37 aa, Homo sapiens
  MAP TO AC020923.4; EXPRESSED IN LUNG, SIGNAL = 2.2; EXPRESSED IN BRAIN, SIGNAL = 1.4; EXPRESSED IN BONE MARROW, SIGNAL = 2.1; EXPRESSED IN PLACENTA, SIGNAL = 1.8
QKAYPSRHQIQEVTMLTIKKQFPDQLNSSHQRNQQNQ

SEQ ID NO: 32733 - protein, 42 aa, Homo sapiens
  MAP TO AC008428.4; EXPRESSED IN BONE MARROW, SIGNAL = 1.1; EXPRESSED IN PLACENTA, SIGNAL = 4.3; EXPRESSED IN HEART, SIGNAL = 3.7; EXPRESSED IN FETAL LIVER, SIGNAL = 6.9; SWISSPROT HIT: P08125, EVALUE 1.30e+00
LGTCSLPCLSLPPTCGLLRSPSLPNKCHPLLHGTQSHRPPKG

SEQ ID NO: 32734 - protein, 43 aa, Homo sapiens
  MAP TO AC004493.1; EXPRESSED IN BONE MARROW, SIGNAL = 3.7; EXPRESSED IN FETAL LIVER, SIGNAL = 7.5
GKGRKTTRRRKMRRKKKKRKRRRKKRRRRRRRKMKRRSWNWNC

SEQ ID NO: 32735 - protein, 59 aa, Homo sapiens
  MAP TO AC004493.1; EXPRESSED IN BONE MARROW, SIGNAL = 3.7; EXPRESSED IN FETAL LIVER, SIGNAL = 7.5
LAGEGEEDDEEEEDEEEEEEEEEEEEEEEEEEEEEDEEEELELELLERLFRLAGVGSGG

SEQ ID NO: 32736 - protein, 66 aa, Homo sapiens
  MAP TO AC010252.3; EXPRESSED IN FETAL LIVER, SIGNAL = 0.61; EXPRESSED IN BRAIN, SIGNAL = 0.86; EXPRESSED IN BONE MARROW, SIGNAL =   1; EXPRESSED IN PLACENTA, SIGNAL = 0.71; EXPRESSED IN HEART, SIGNAL = 1.1; SWISSPROT HIT: P04073, EVALUE 7.10e-01
DVWQTAHLPVGQEISWSQTLIDDYRKNQLGCGFCSVLKITGLIDLKLAGSLQASNELSQLPKQQEE

SEQ ID NO: 32737 - protein, 46 aa, Homo sapiens
  MAP TO AC010336.5; EXPRESSED IN HELA, SIGNAL = 0.83; EXPRESSED IN BRAIN, SIGNAL = 0.86; EXPRESSED IN LUNG, SIGNAL = 1.2; EXPRESSED IN BONE MARROW, SIGNAL = 0.86; EXPRESSED IN PLACENTA, SIGNAL = 0.55; SWISSPROT HIT: O43615, EVALUE 3.00e-19
GVESVKKEIDDSVLGQTGPYRRPQRLRKRTEFAGDKFKEEKVFEPN

SEQ ID NO: 32738 - protein, 90 aa, Homo sapiens
  MAP TO AC016656.5; EXPRESSED IN BONE MARROW, SIGNAL = 0.44; EXPRESSED IN PLACENTA, SIGNAL = 0.88; SWISSPROT HIT: P21514, EVALUE 3.60e+00
LNLESQKQAFCSGIAFPTFLAYFGVSVHPDAPGNLTLTSNEVSLLPLLSVGTSLTPDPPCSLLQPHSMLSVEERLPEEKEEEEEGEEDVD

SEQ ID NO: 32739 - protein, 42 aa, Homo sapiens
  MAP TO AC008806.4; EXPRESSED IN BRAIN, SIGNAL = 0.5; EXPRESSED IN BONE MARROW, SIGNAL = 0.67; SWISSPROT HIT: Q06730, EVALUE 7.00e-12
GTVTFKDVAIDFTQEEWKRLDPAQRKLYRNVMLENYNNLITV

SEQ ID NO: 32740 - protein, 42 aa, Homo sapiens
  MAP TO AC006930.1; EXPRESSED IN HEART, SIGNAL = 3.4; EXPRESSED IN FETAL LIVER, SIGNAL = 2.5; EXPRESSED IN BRAIN, SIGNAL =   4; EXPRESSED IN LUNG, SIGNAL = 4.7; EXPRESSED IN BONE MARROW, SIGNAL = 4.6; EXPRESSED IN PLACENTA, SIGNAL = 3.8
AAEPPLLLPGARATAVAGGETRGEGEPGTGGGEFAEPAVPAG

SEQ ID NO: 32741 - protein, 74 aa, Homo sapiens
  MAP TO AC008901.4; EXPRESSED IN BRAIN, SIGNAL = 0.68; EXPRESSED IN LUNG, SIGNAL = 0.8; EXPRESSED IN BONE MARROW, SIGNAL = 0.58; SWISSPROT HIT: P19883, EVALUE 3.00e-41
TCRDVFCPGSSTCVVDQTNNAYCVTCNRICPEPASSEQYLCGNDGVTYSSACHLRKATCLLGRSIGLAYEGKCI

SEQ ID NO: 32742 - protein, 19 aa, Homo sapiens
  MAP TO AC008901.4; EXPRESSED IN BRAIN, SIGNAL = 0.68; EXPRESSED IN LUNG, SIGNAL = 0.8; EXPRESSED IN BONE MARROW, SIGNAL = 0.58
DLSGCFLSRQLHMCGGPDQ

SEQ ID NO: 32743 - protein, 42 aa, Homo sapiens
  MAP TO AC003968.1; EXPRESSED IN PLACENTA, SIGNAL =  11; EXPRESSED IN FETAL LIVER, SIGNAL = 9.8; EXPRESSED IN BRAIN, SIGNAL = 8.3; EXPRESSED IN LUNG, SIGNAL = 4.3; EXPRESSED IN BONE MARROW, SIGNAL = 3.9
MLKEPNRYPILLMMRCHSHSQCRIFPPVLHPMPPPVIIGIIM

SEQ ID NO: 32744 - protein, 42 aa, Homo sapiens
  MAP TO AC003968.1; EXPRESSED IN PLACENTA, SIGNAL =  11; EXPRESSED IN FETAL LIVER, SIGNAL = 9.8; EXPRESSED IN BRAIN, SIGNAL = 8.3; EXPRESSED IN LUNG, SIGNAL = 4.3; EXPRESSED IN BONE MARROW, SIGNAL = 3.9; SWISSPROT HIT: P54259, EVALUE 9.90e-01
DAKGTKQIPNPSNDEMSQPFPMPYLPTCASSHATTSNNWNHH

SEQ ID NO: 32745 - protein, 80 aa, Homo sapiens
  MAP TO AC004509.1; EXPRESSED IN HEART, SIGNAL = 2.2; EXPRESSED IN FETAL LIVER, SIGNAL = 1.3; EXPRESSED IN BONE MARROW, SIGNAL = 0.96; EXPRESSED IN PLACENTA, SIGNAL = 1.6; SWISSPROT HIT: Q92793, EVALUE 6.00e-24
ILGSPASGIQNTIGSVGTGQQNATSLSNPNPIDPSSMQRAYAALGLPYMNQPQTQLQPQVPGQQPAQPQTHQQMRTLNPL

SEQ ID NO: 32746 - protein, 65 aa, Homo sapiens
  MAP TO AC004143.1; EXPRESSED IN HEART, SIGNAL = 1.5; EXPRESSED IN BRAIN, SIGNAL = 1.5; EXPRESSED IN BONE MARROW, SIGNAL = 1.5; SWISSPROT HIT: P53736, EVALUE 6.00e+00
MQPITNHPVPRMCMLVPLPTWAEGGVVEPLCSHGPKYSIMGWRTPATLYSTKSPTCDVNPTSPAT

SEQ ID NO: 32747 - protein, 20 aa, Homo sapiens
  MAP TO AF134576.1; EXPRESSED IN FETAL LIVER, SIGNAL = 1.4; EXPRESSED IN HELA, SIGNAL = 1.4; EXPRESSED IN BONE MARROW, SIGNAL = 0.83; EXPRESSED IN PLACENTA, SIGNAL = 0.92
VLRGQADQDHQEAPEDPQEA

SEQ ID NO: 32748 - protein, 54 aa, Homo sapiens
  MAP TO AF254983.1; EXPRESSED IN FETAL LIVER, SIGNAL = 0.95; EXPRESSED IN LUNG, SIGNAL =   1; EXPRESSED IN BONE MARROW, SIGNAL = 0.81; EXPRESSED IN PLACENTA, SIGNAL = 0.95; SWISSPROT HIT: P55200, EVALUE 2.00e-04
RCAFCKHFGATIKCCEEKCTQMYHYPCAAGADTFQDFSHIFLLCPEHIDQAPER

SEQ ID NO: 32749 - protein, 50 aa, Homo sapiens
  MAP TO AF176815.1; EXPRESSED IN HEART, SIGNAL = 2.5; EXPRESSED IN FETAL LIVER, SIGNAL = 3.2; EXPRESSED IN BRAIN, SIGNAL = 2.1; EXPRESSED IN BONE MARROW, SIGNAL = 2.7; EXPRESSED IN PLACENTA, SIGNAL =   3; SWISSPROT HIT: P55201, EVALUE 6.00e-19
KHKNKEKRKDSNHHHHHNVSASTTPKLPEVVYRELEQDTPDAPPRPTSYY

SEQ ID NO: 32750 - protein, 105 aa, Homo sapiens
  MAP TO AF176815.1; EXPRESSED IN HEART, SIGNAL = 2.5; EXPRESSED IN FETAL LIVER, SIGNAL = 3.2; EXPRESSED IN BRAIN, SIGNAL = 2.1; EXPRESSED IN BONE MARROW, SIGNAL = 2.7; EXPRESSED IN PLACENTA, SIGNAL =   3
PSAWWRWTCMAASTASASLTTWMWCQRMRKPPRRPLRMAATRRTLRHQLLLPSQANIRTRRSARTPTITTTTMFLRAPLPSCQRWSIGSWNRTPLMPHPGQLPIT

SEQ ID NO: 32751 - protein, 23 aa, Homo sapiens
  MAP TO AF176815.1; EXPRESSED IN HEART, SIGNAL = 2.5; EXPRESSED IN FETAL LIVER, SIGNAL = 3.2; EXPRESSED IN BRAIN, SIGNAL = 2.1; EXPRESSED IN BONE MARROW, SIGNAL = 2.7; EXPRESSED IN PLACENTA, SIGNAL =   3
ELCTGPAHGGGGLAWPRPPHQHL

SEQ ID NO: 32752 - protein, 26 aa, Homo sapiens
  MAP TO AD000091.1; EXPRESSED IN BONE MARROW, SIGNAL = 3.1; EXPRESSED IN PLACENTA, SIGNAL = 1.9; EXPRESSED IN HEART, SIGNAL = 2.1; EXPRESSED IN LUNG, SIGNAL = 2.9; EXPRESSED IN HELA, SIGNAL = 1.9; EXPRESSED IN FETAL LIVER, SIGNAL =   2; EXPRESSED IN BRAIN, SIGNAL = 2.1; SWISSPROT HIT: O59939, EVALUE 3.00e+00
WGSWAQSESPPPPPGTASARRSPWLR

SEQ ID NO: 32753 - protein, 66 aa, Homo sapiens
  MAP TO AD000091.1; EXPRESSED IN BONE MARROW, SIGNAL = 3.1; EXPRESSED IN PLACENTA, SIGNAL = 1.9; EXPRESSED IN HEART, SIGNAL = 2.1; EXPRESSED IN LUNG, SIGNAL = 2.9; EXPRESSED IN HELA, SIGNAL = 1.9; EXPRESSED IN FETAL LIVER, SIGNAL =   2; EXPRESSED IN BRAIN, SIGNAL = 2.1; SWISSPROT HIT: P78329, EVALUE 7.00e-23
RVPTPSPGNCIGQTFAMAEMKVVLALTLLRFRVLPDHAEPRRKLELIVRAEDGLWLRVEPLSADLQ

SEQ ID NO: 32754 - protein, 70 aa, Homo sapiens
  MAP TO AC011311.11; EXPRESSED IN LUNG, SIGNAL = 1.2; EXPRESSED IN HELA, SIGNAL = 2.4; EXPRESSED IN BRAIN, SIGNAL = 1.5; EXPRESSED IN BONE MARROW, SIGNAL = 0.73; EXPRESSED IN HEART, SIGNAL = 2.4
SSEYVILTIFARLHVAFMEERIFRGPYSVNFTDVTKVTVLTLMGIYLFRQCQFSKRDRMLAKEGITSNKK

SEQ ID NO: 32755 - protein, 41 aa, Homo sapiens
  MAP TO AC012152.12; EXPRESSED IN HELA, SIGNAL = 1.2; EXPRESSED IN BRAIN, SIGNAL = 1.3; EXPRESSED IN BONE MARROW, SIGNAL = 0.95; EXPRESSED IN PLACENTA, SIGNAL = 1.2
IAVVVMETLVAVVMMTALWWQEWWQSRKQQQPVNAGFWILS

SEQ ID NO: 32756 - protein, 95 aa, Homo sapiens
  MAP TO AC011452.5; EXPRESSED IN BONE MARROW, SIGNAL = 1.2; EXPRESSED IN PLACENTA, SIGNAL = 0.97; EXPRESSED IN HEART, SIGNAL =   1; EXPRESSED IN BRAIN, SIGNAL = 0.44; EXPRESSED IN FETAL LIVER, SIGNAL = 1.5
PPQLLGPSCSWEAEGLHCSCSSQASPAPSLRWWLGEELLEGNSSQGSFEVTPSSAGPWANSSLSLHGGLSSGLRLRCKAWNVHGAQSGSVFQLLP

SEQ ID NO: 32757 - protein, 63 aa, Homo sapiens
  MAP TO AC011452.5; EXPRESSED IN BONE MARROW, SIGNAL = 1.2; EXPRESSED IN PLACENTA, SIGNAL = 0.97; EXPRESSED IN HEART, SIGNAL =   1; EXPRESSED IN BRAIN, SIGNAL = 0.44; EXPRESSED IN FETAL LIVER, SIGNAL = 1.5
TLHSCWAPPAPGRLRVCTAAAPPRPARPPLCAGGLGRSCWRGTAVRAPSRSPPAQPGPGPTAP

SEQ ID NO: 32758 - protein, 48 aa, Homo sapiens
  MAP TO AC022150.5; EXPRESSED IN LUNG, SIGNAL = 0.85; EXPRESSED IN FETAL LIVER, SIGNAL = 1.6; EXPRESSED IN BONE MARROW, SIGNAL = 0.51; EXPRESSED IN PLACENTA, SIGNAL = 1.6; EXPRESSED IN HEART, SIGNAL =   2
QGFAFYILVCIPVPDNSRAFESCFSLPDRSRLQSPKNRVAGSEAERRT

SEQ ID NO: 32759 - protein, 27 aa, Homo sapiens
  MAP TO AC022150.5; EXPRESSED IN LUNG, SIGNAL = 0.85; EXPRESSED IN FETAL LIVER, SIGNAL = 1.6; EXPRESSED IN BONE MARROW, SIGNAL = 0.51; EXPRESSED IN PLACENTA, SIGNAL = 1.6; EXPRESSED IN HEART, SIGNAL =   2
AGLCILHSCLHPRSRQFQGFRIVLQPS

SEQ ID NO: 32760 - protein, 157 aa, Homo sapiens
  MAP TO AC010451.5; EXPRESSED IN BONE MARROW, SIGNAL = 0.9; EXPRESSED IN PLACENTA, SIGNAL = 0.46; SWISSPROT HIT: Q64350, EVALUE 3.30e+00
ISDSPSATYGDSKTYPTDYQWFLHHKPGHHVVGWLQKDPNKSPHIYSFSSIIFTSLQLCLGLSHVTYINQLDAKKITSTYTKFPCAFLHNWACWVLALCIYRDDMCGGTEECESPVDESPVVSAIATETIINWSQPLTPNMSGSPASISRGTHQTCS

SEQ ID NO: 32761 - protein, 31 aa, Homo sapiens
  MAP TO AC010451.5; EXPRESSED IN BONE MARROW, SIGNAL = 0.9; EXPRESSED IN PLACENTA, SIGNAL = 0.46
YQIHLALPMEILRLIPLIISGFFITNQVTMW

SEQ ID NO: 32762 - protein, 39 aa, Homo sapiens
  MAP TO AC002114.1; EXPRESSED IN BONE MARROW, SIGNAL = 0.39
YPGCGDSCIQYLNFRKRWNFPKLTNSEEWEVAPIKHSVL

SEQ ID NO: 32763 - protein, 29 aa, Homo sapiens
  MAP TO AC011891.2; EXPRESSED IN BONE MARROW, SIGNAL = 2.2; EXPRESSED IN PLACENTA, SIGNAL = 1.8; EXPRESSED IN HEART, SIGNAL = 1.6; EXPRESSED IN FETAL LIVER, SIGNAL = 1.5
TARQTRRTERGCGAAARLDFLSAAPKGCF

SEQ ID NO: 32764 - protein, 67 aa, Homo sapiens
  MAP TO AC004391.1; EXPRESSED IN BONE MARROW, SIGNAL = 0.53; EXPRESSED IN PLACENTA, SIGNAL = 0.53; SWISSPROT HIT: Q9PW72, EVALUE 6.00e+00
PGVVGEKQQNQPILEWTPKRHYVLNVQPGPTENKKTKGKPSLGIFDEIVWEFGEGGLNSRELVEGVW

SEQ ID NO: 32765 - protein, 45 aa, Homo sapiens
  MAP TO AF205588.1; EXPRESSED IN BONE MARROW, SIGNAL = 0.65; EXPRESSED IN PLACENTA, SIGNAL = 0.75; EXPRESSED IN FETAL LIVER, SIGNAL = 0.57
CLMTSVHMENYSSIVTMKKLIWKRNLMSLFKMENVSVIRRTSFHI

SEQ ID NO: 32766 - protein, 125 aa, Homo sapiens
  MAP TO AF205588.1; EXPRESSED IN BONE MARROW, SIGNAL = 0.65; EXPRESSED IN PLACENTA, SIGNAL = 0.75; EXPRESSED IN FETAL LIVER, SIGNAL = 0.57; SWISSPROT HIT: Q06730, EVALUE 3.00e-20
MPHDLSAYGKLFLNSNHEKTHMEEKPYEFIQNGKCLSHKEDFISYLRIQNLEQSFEYKECEKDFYGKAVFITYKQAYTGASPCVHNECNKVFCNNSTLMVHKMSEKRENFYEFNEYEKTFEKSPF

SEQ ID NO: 32767 - protein, 60 aa, Homo sapiens
  MAP TO AL049764.4; EXPRESSED IN BONE MARROW, SIGNAL = 4.1; EXPRESSED IN PLACENTA, SIGNAL = 4.3; EXPRESSED IN HEART, SIGNAL =   3; EXPRESSED IN BRAIN, SIGNAL = 3.9; EXPRESSED IN FETAL LIVER, SIGNAL = 4.4; EXPRESSED IN LUNG, SIGNAL = 4.1
KPMRVTFVVAGARVKGESLLFTQEETSLLSIFGIFHGKASQCWCARFSPITVKVAAVSFS

SEQ ID NO: 32768 - protein, 60 aa, Homo sapiens
  MAP TO AC016630.5; EXPRESSED IN LUNG, SIGNAL = 1.8; EXPRESSED IN BONE MARROW, SIGNAL =   3; EXPRESSED IN PLACENTA, SIGNAL = 2.5; EXPRESSED IN HEART, SIGNAL = 3.5; SWISSPROT HIT: O14177, EVALUE 5.00e-04
DAVRIMAKDLVRTRRYVRKFVLMRANIQAVSLKIQTLKSNNSMAQAMKGVTKAMGTMNRQ

SEQ ID NO: 32769 - protein, 59 aa, Homo sapiens
  MAP TO AC016630.5; EXPRESSED IN LUNG, SIGNAL = 1.8; EXPRESSED IN BONE MARROW, SIGNAL =   3; EXPRESSED IN PLACENTA, SIGNAL = 2.5; EXPRESSED IN HEART, SIGNAL = 3.5
CCSHHGKRLGAHPALCAQVCIDAGQHPGCVPQDPDTQVQQLDGTSHEGCHQGHGHHEQT

SEQ ID NO: 32770 - protein, 18 aa, Homo sapiens
  MAP TO AC010168.6; EXPRESSED IN BONE MARROW, SIGNAL = 7.1; EXPRESSED IN FETAL LIVER, SIGNAL = 7.6
MITSRLQLQRRRQTALGV

SEQ ID NO: 32771 - protein, 57 aa, Homo sapiens
  MAP TO AL121928.13; EXPRESSED IN BRAIN, SIGNAL = 0.98; EXPRESSED IN LUNG, SIGNAL = 2.2; EXPRESSED IN BONE MARROW, SIGNAL = 1.2; EXPRESSED IN PLACENTA, SIGNAL = 1.1; EXPRESSED IN FETAL LIVER, SIGNAL = 1.2; SWISSPROT HIT: Q00653, EVALUE 2.00e-26
PGLSLGDTALQNLEQLLDGPEAQGSWAELAERLGLRSLVDTYRQTTSPSGSLLRSYE

SEQ ID NO: 32772 - protein, 17 aa, Homo sapiens
  MAP TO AL121928.13; EXPRESSED IN BRAIN, SIGNAL = 0.98; EXPRESSED IN LUNG, SIGNAL = 2.2; EXPRESSED IN BONE MARROW, SIGNAL = 1.2; EXPRESSED IN PLACENTA, SIGNAL = 1.1; EXPRESSED IN FETAL LIVER, SIGNAL = 1.2
GRDCHLVIQLCRTWSSC

SEQ ID NO: 32773 - protein, 38 aa, Homo sapiens
  MAP TO AC010389.6; EXPRESSED IN FETAL LIVER, SIGNAL = 0.84; EXPRESSED IN LUNG, SIGNAL = 1.3; EXPRESSED IN BONE MARROW, SIGNAL =   1; EXPRESSED IN PLACENTA, SIGNAL = 0.78
VSAAPSVSATIPISNVQGLLQVLGQGLFLLMHCWAQLF

SEQ ID NO: 32774 - protein, 52 aa, Homo sapiens
  MAP TO AC010389.6; EXPRESSED IN FETAL LIVER, SIGNAL = 0.84; EXPRESSED IN LUNG, SIGNAL = 1.3; EXPRESSED IN BONE MARROW, SIGNAL =   1; EXPRESSED IN PLACENTA, SIGNAL = 0.78
ERNYSNQQRPGTAAGSWAGVISADALLGTTILISRVQGPLWVLGQEVFLLLR

SEQ ID NO: 32775 - protein, 176 aa, Homo sapiens
  MAP TO AC004826.3; EXPRESSED IN BONE MARROW, SIGNAL = 1.1; EXPRESSED IN FETAL LIVER, SIGNAL = 0.61; SWISSPROT HIT: Q9H1J5, EVALUE 1.00e-105
AVRATMKRTCKCHGISGSCSIQTCWLQLAEFREMGDYLKAKYDQALKIEMDKRQLRAGNSAEGHWVPAEAFLPSAEAELIFLEESPDYCTCNSSLGIYGTEGRECLQNSHNTSRWERRSCGRLCTECGLQVEERKTEVISSCNCKFQWCCTVKCDQCRHVVSKYYCARSPGSAQSL

SEQ ID NO: 32776 - protein, 30 aa, Homo sapiens
  MAP TO AC007793.1; EXPRESSED IN HEART, SIGNAL =   2; EXPRESSED IN LUNG, SIGNAL = 7.5; EXPRESSED IN BONE MARROW, SIGNAL = 2.8
MPEPPTHSMGSCAARASPTSTTPCSTAPSP

SEQ ID NO: 32777 - protein, 101 aa, Homo sapiens
  MAP TO AC025436.2; EXPRESSED IN FETAL LIVER, SIGNAL = 1.6; EXPRESSED IN BONE MARROW, SIGNAL = 0.64; EXPRESSED IN PLACENTA, SIGNAL = 1.3; SWISSPROT HIT: O29366, EVALUE 8.80e-01
FDFAYTRNSCLPLRKSEAKRISKQLLWPQFFSGSYRIDFKTVLINSIKSSAKLRYQLVAQLVQYAERQESPRNPLRPRLPEVAVASTSGTGPKSGPTRRKR

SEQ ID NO: 32778 - protein, 36 aa, Homo sapiens
  MAP TO AC025436.2; EXPRESSED IN FETAL LIVER, SIGNAL = 1.6; EXPRESSED IN BONE MARROW, SIGNAL = 0.64; EXPRESSED IN PLACENTA, SIGNAL = 1.3
STLLTQETAASPCGSRKPSAFQNSFCGRNFSQALTE

SEQ ID NO: 32779 - protein, 54 aa, Homo sapiens
  MAP TO AF238380.1; EXPRESSED IN BONE MARROW, SIGNAL = 0.87; EXPRESSED IN PLACENTA, SIGNAL = 1.4
GLCRLYTVEDLGIKAIRVYCQLSEEFDGLFSSTCFLWLFEEGFCAPECEVSELL

SEQ ID NO: 32780 - protein, 43 aa, Homo sapiens
  MAP TO AC020948.6; EXPRESSED IN BRAIN, SIGNAL = 1.2; EXPRESSED IN BONE MARROW, SIGNAL = 1.2
AQRLAKHKASLPDLTGGEAVETAPHGGQAVATTGAQGATEDQV

SEQ ID NO: 32781 - protein, 35 aa, Homo sapiens
  MAP TO AL035535.1; EXPRESSED IN LUNG, SIGNAL = 2.6; EXPRESSED IN FETAL LIVER, SIGNAL =   3; EXPRESSED IN BONE MARROW, SIGNAL = 2.8; EXPRESSED IN PLACENTA, SIGNAL = 2.6; EXPRESSED IN HELA, SIGNAL = 2.7; SWISSPROT HIT: Q57809, EVALUE 3.80e+00
MWENLELPRDLLNAFDENADSDKDNEIQAEVVSDG

SEQ ID NO: 32782 - protein, 71 aa, Homo sapiens
  MAP TO AC007023.3; EXPRESSED IN BONE MARROW, SIGNAL = 0.4; SWISSPROT HIT: P32096, EVALUE 1.20e+00
LLPALGPQGIIDNSQRNYMRKEDLASLKPNGEVLFCEKVLNIELKNKVQDRENKVQNREGNLSKHINEILS

SEQ ID NO: 32783 - protein, 25 aa, Homo sapiens
  MAP TO AF015721.1; EXPRESSED IN LUNG, SIGNAL =   1; EXPRESSED IN FETAL LIVER, SIGNAL = 0.97; EXPRESSED IN PLACENTA, SIGNAL =   1; EXPRESSED IN BONE MARROW, SIGNAL = 1.1
DAALTGSGIKGLLVLVLAPLFTQLA

SEQ ID NO: 32784 - protein, 60 aa, Homo sapiens
  MAP TO AB015355.1; EXPRESSED IN HEART, SIGNAL = 4.8; EXPRESSED IN HELA, SIGNAL = 2.7; EXPRESSED IN FETAL LIVER, SIGNAL = 5.8; EXPRESSED IN BONE MARROW, SIGNAL = 0.69; EXPRESSED IN PLACENTA, SIGNAL = 2.7; SWISSPROT HIT: P49281, EVALUE 3.00e-22
TVICSYVFFQGFLNLKWSRFARVVLTRSIAIIPTLLVAVFQDVEHLTGMNDFLNVLQSLQ

SEQ ID NO: 32785 - protein, 39 aa, Homo sapiens
  MAP TO AB015355.1; EXPRESSED IN HEART, SIGNAL = 4.8; EXPRESSED IN HELA, SIGNAL = 2.7; EXPRESSED IN FETAL LIVER, SIGNAL = 5.8; EXPRESSED IN BONE MARROW, SIGNAL = 0.69; EXPRESSED IN PLACENTA, SIGNAL = 2.7; SWISSPROT HIT: P21804, EVALUE 7.70e-01
IPEPKVVTLCPSGSDSLYCHHPHSACCCLPRCRASNRDE

SEQ ID NO: 32786 - protein, 144 aa, Homo sapiens
  MAP TO AC010387.4; EXPRESSED IN FETAL LIVER, SIGNAL = 0.62; EXPRESSED IN BRAIN, SIGNAL = 1.1; EXPRESSED IN PLACENTA, SIGNAL = 0.78; EXPRESSED IN BONE MARROW, SIGNAL = 0.63; SWISSPROT HIT: Q9Y6N8, EVALUE 1.00e-71
IVVLFAALKRQRKKEPLILSKEDIRDNIVSYNDEGGGEEDTQAFDIGTLRNPAAIEEKKLRRDIIPETLFIPRRTPTAPDNTDVRDFINERLKEHDLDPTAPPYDSLATYAYEGNDSIAESLSSLESGTTEGDQNYDYLREWGP

SEQ ID NO: 32787 - protein, 30 aa, Homo sapiens
  MAP TO AL078614.2; EXPRESSED IN LUNG, SIGNAL =   3; EXPRESSED IN BRAIN, SIGNAL = 6.5; EXPRESSED IN BONE MARROW, SIGNAL = 5.4; EXPRESSED IN HEART, SIGNAL = 4.8
MWPLSVFKGSNNTLNPSCDSNHFDFSGCKP

SEQ ID NO: 32788 - protein, 25 aa, Homo sapiens
  MAP TO AC010339.6; EXPRESSED IN BONE MARROW, SIGNAL = 0.48; EXPRESSED IN LUNG, SIGNAL = 0.39; EXPRESSED IN FETAL LIVER, SIGNAL = 0.39
MFKTQPLVSQNGTVFGDRDFIEVIK

SEQ ID NO: 32789 - protein, 20 aa, Homo sapiens
  MAP TO AC010339.6; EXPRESSED IN BONE MARROW, SIGNAL = 0.48; EXPRESSED IN LUNG, SIGNAL = 0.39; EXPRESSED IN FETAL LIVER, SIGNAL = 0.39
QLHSAPDWHTPRLLVARFCA

SEQ ID NO: 32790 - protein, 25 aa, Homo sapiens
  MAP TO AC005580.1; EXPRESSED IN FETAL LIVER, SIGNAL = 0.77; EXPRESSED IN HELA, SIGNAL = 0.77; EXPRESSED IN BRAIN, SIGNAL = 0.79; EXPRESSED IN BONE MARROW, SIGNAL = 0.98
WRTKPRREIGELSLQGSQQRSLTKC

SEQ ID NO: 32791 - protein, 19 aa, Homo sapiens
  MAP TO AC000031.5; EXPRESSED IN BRAIN, SIGNAL = 0.44; EXPRESSED IN BONE MARROW, SIGNAL = 0.92; EXPRESSED IN PLACENTA, SIGNAL = 0.46; EXPRESSED IN FETAL LIVER, SIGNAL = 3.2
GFWHSRNLLLLLFDTLYGS

SEQ ID NO: 32792 - protein, 78 aa, Homo sapiens
  MAP TO AL121929.17; EXPRESSED IN BONE MARROW, SIGNAL = 0.95; EXPRESSED IN PLACENTA, SIGNAL = 1.4; EXPRESSED IN FETAL LIVER, SIGNAL = 0.61; SWISSPROT HIT: O10296, EVALUE 2.00e-06
TAPNSPVSLPESPVTPGLGQWSDECTICYEHAVDTVIYTCGHMCLCYACGLRLKKALHACCPICRRPIKDIIKTYRSS

SEQ ID NO: 32793 - protein, 38 aa, Homo sapiens
  MAP TO AL109944.19; EXPRESSED IN FETAL LIVER, SIGNAL = 1.6; EXPRESSED IN BRAIN, SIGNAL = 0.54; EXPRESSED IN BONE MARROW, SIGNAL = 0.76; EXPRESSED IN PLACENTA, SIGNAL = 1.8
LLSEAFHGFIPPIPIGMNVSLFSVIPVFCLGFCHTTFN

SEQ ID NO: 32794 - protein, 24 aa, Homo sapiens
  MAP TO AC004496.1; EXPRESSED IN HEART, SIGNAL = 2.2; EXPRESSED IN BRAIN, SIGNAL =   2; EXPRESSED IN HELA, SIGNAL = 2.2; EXPRESSED IN BONE MARROW, SIGNAL = 0.7
VKRRARGRSVPRRQPCRRRTQTRR

SEQ ID NO: 32795 - protein, 152 aa, Homo sapiens
  MAP TO AC004496.1; EXPRESSED IN HEART, SIGNAL = 2.2; EXPRESSED IN BRAIN, SIGNAL =   2; EXPRESSED IN HELA, SIGNAL = 2.2; EXPRESSED IN BONE MARROW, SIGNAL = 0.7
PGSMGPVDTFLPLKRLMVSGAGEKGVAQRPGLALFSSSSCEFGAAFESAGEEEGEGEVSASQAAVQAADTDEALRCYIRSKPALYQKVLLYQPFELRELQAELRQNGLRVSSRRLLDFLDTHCITFTTAATRREKLQGRRRQPRGKKKVERN

SEQ ID NO: 32796 - protein, 18 aa, Homo sapiens
  MAP TO AC008719.5; EXPRESSED IN BONE MARROW, SIGNAL = 2.7; EXPRESSED IN PLACENTA, SIGNAL = 2.8; EXPRESSED IN HEART, SIGNAL = 3.6; EXPRESSED IN BRAIN, SIGNAL = 3.1; EXPRESSED IN LUNG, SIGNAL = 2.4
QLRQEPAIWMCTCRSQGI

SEQ ID NO: 32797 - protein, 37 aa, Homo sapiens
  MAP TO AF270510.1; EXPRESSED IN BRAIN, SIGNAL = 3.9; EXPRESSED IN FETAL LIVER, SIGNAL = 2.7; EXPRESSED IN BONE MARROW, SIGNAL = 1.4
MPALAASPSQSLLLCQQSGWLDLALAYSYAASCKEPR

SEQ ID NO: 32798 - protein, 36 aa, Homo sapiens
  MAP TO AF270510.1; EXPRESSED IN BRAIN, SIGNAL = 3.9; EXPRESSED IN FETAL LIVER, SIGNAL = 2.7; EXPRESSED IN BONE MARROW, SIGNAL = 1.4; SWISSPROT HIT: P35624, EVALUE 1.30e+00
CLLWLQAPHRACSCVSRVAGWILHSLTHMLPPARSL

SEQ ID NO: 32799 - protein, 23 aa, Homo sapiens
  MAP TO AC011452.5; EXPRESSED IN PLACENTA, SIGNAL = 2.4; EXPRESSED IN LUNG, SIGNAL = 2.5; EXPRESSED IN BONE MARROW, SIGNAL = 2.2
GCGKHKGAVRKPPFHPWLTRCPC

SEQ ID NO: 32800 - protein, 27 aa, Homo sapiens
  MAP TO AC004199.1; EXPRESSED IN BRAIN, SIGNAL = 1.1; EXPRESSED IN BONE MARROW, SIGNAL = 0.51
TQKKLKQRPSRYLYIMFITTLFTTAKR

SEQ ID NO: 32801 - protein, 30 aa, Homo sapiens
  MAP TO AC005307.1; EXPRESSED IN BRAIN, SIGNAL = 0.4; EXPRESSED IN BONE MARROW, SIGNAL = 0.42
MVVGQEKELGMLFASDMNTGYVVIVHARYA

SEQ ID NO: 32802 - protein, 49 aa, Homo sapiens
  MAP TO AL117380.28; EXPRESSED IN BRAIN, SIGNAL = 2.3; EXPRESSED IN HELA, SIGNAL = 2.6; EXPRESSED IN FETAL LIVER, SIGNAL = 2.7; EXPRESSED IN BONE MARROW, SIGNAL = 1.3
PRRVALLRTEKLLHVALEAVKQALCKLRLRPCQMLVVYLGLCYVPESGI

SEQ ID NO: 32803 - protein, 62 aa, Homo sapiens
  MAP TO AC023172.1; EXPRESSED IN FETAL LIVER, SIGNAL = 1.1; EXPRESSED IN BRAIN, SIGNAL = 0.66; EXPRESSED IN BONE MARROW, SIGNAL = 0.45; SWISSPROT HIT: P20813, EVALUE 1.00e-31
RVYREIEQVIGPHRPPELHDRAKMPYTEAVIYEIQRFSDLLPMGVPHIVTQHTSFRGYIIPK

SEQ ID NO: 32804 - protein, 41 aa, Homo sapiens
  MAP TO AC027329.3; EXPRESSED IN BRAIN, SIGNAL = 1.6; EXPRESSED IN FETAL LIVER, SIGNAL = 0.95; EXPRESSED IN BONE MARROW, SIGNAL = 1.2
LLIPYALALPHPLRGSLIMNADPWIMIGWENVEIYTEQHIQ

SEQ ID NO: 32805 - protein, 56 aa, Homo sapiens
  MAP TO AC008964.4; EXPRESSED IN LUNG, SIGNAL = 1.1; EXPRESSED IN BONE MARROW, SIGNAL = 1.1; EXPRESSED IN PLACENTA, SIGNAL = 0.59; SWISSPROT HIT: P35659, EVALUE 3.60e+00
LQNPEVVALRGGLNTILKNVIDCQLSRINEALITTILHLLNHPKTRQYVRADVELE

SEQ ID NO: 32806 - protein, 74 aa, Homo sapiens
  MAP TO AC008509.5; EXPRESSED IN HELA, SIGNAL = 0.77; EXPRESSED IN BONE MARROW, SIGNAL = 0.66; EXPRESSED IN PLACENTA, SIGNAL = 0.62; SWISSPROT HIT: P33896, EVALUE 1.40e+00
IQLYHSETLELMLRRWSKLEKDFKTKNGRYDISKIPDIYDCIKYDVQHNGSLKLENTMELYRLSKALADIVIPQ

SEQ ID NO: 32807 - protein, 19 aa, Homo sapiens
  MAP TO AC008509.5; EXPRESSED IN HELA, SIGNAL = 0.77; EXPRESSED IN BONE MARROW, SIGNAL = 0.66; EXPRESSED IN PLACENTA, SIGNAL = 0.62
IFSFTIVKHWSLCYVDGPS

SEQ ID NO: 32808 - protein, 37 aa, Homo sapiens
  MAP TO AC004143.1; EXPRESSED IN BONE MARROW, SIGNAL = 0.62; SWISSPROT HIT: O43506, EVALUE 6.50e+00
PIEPVKVCLRRACTQRACTQQACSKHTEGVTYECPAA

SEQ ID NO: 32809 - protein, 33 aa, Homo sapiens
  MAP TO AC004213.1; EXPRESSED IN BONE MARROW, SIGNAL = 0.72
VKQCPCWLLPVLTPPSINLPHNSLQIKLPQLLL

SEQ ID NO: 32810 - protein, 17 aa, Homo sapiens
  MAP TO AC006129.1; EXPRESSED IN FETAL LIVER, SIGNAL = 0.38; EXPRESSED IN BONE MARROW, SIGNAL = 0.5
GWDQDFCHQKPAGGYRQ

SEQ ID NO: 32811 - protein, 41 aa, Homo sapiens
  MAP TO AF107259.1; EXPRESSED IN BONE MARROW, SIGNAL = 0.62; EXPRESSED IN PLACENTA, SIGNAL = 1.3
NIPCTIVETGWMPCALSGHVRPTEGQIRVKRKPEDGRDIFE

SEQ ID NO: 32812 - protein, 29 aa, Homo sapiens
  MAP TO AF107259.1; EXPRESSED IN BONE MARROW, SIGNAL = 0.62; EXPRESSED IN PLACENTA, SIGNAL = 1.3
PTSHAPSWRLAGCPVLYQGMSDQQRGKSE

SEQ ID NO: 32813 - protein, 54 aa, Homo sapiens
  MAP TO AC004523.1; EXPRESSED IN BONE MARROW, SIGNAL = 0.62; SWISSPROT HIT: P78329, EVALUE 5.00e-21
NCIGQAFAMAEMKVVLALMLLHFRFLPDHTEPRRKLELIMRAEGGLWLRVEPLN

SEQ ID NO: 32814 - protein, 56 aa, Homo sapiens
  MAP TO AC011248.8; EXPRESSED IN FETAL LIVER, SIGNAL = 0.44; EXPRESSED IN BONE MARROW, SIGNAL = 1.5; SWISSPROT HIT: P24917, EVALUE 8.00e+00
NLAYEIILTLGQAFEVAYQLALQARKGGHSSTLPESFENKPSKPIPKPRVSIRKSV

SEQ ID NO: 32815 - protein, 97 aa, Homo sapiens
  MAP TO AC006293.1; EXPRESSED IN LUNG, SIGNAL = 0.53; EXPRESSED IN BONE MARROW, SIGNAL = 0.89; SWISSPROT HIT: P43631, EVALUE 4.00e-53
LYEKPSLSAQPGPTVLAGESVTLSCSSRSSYDMYHLSREGEAHERRFSAGPKVNGTFQADFPLGPATHGGTYRCFGSFRDSPYEWSNSSDPLLVSVT

SEQ ID NO: 32816 - protein, 21 aa, Homo sapiens
  MAP TO AC006293.1; EXPRESSED IN LUNG, SIGNAL = 0.53; EXPRESSED IN BONE MARROW, SIGNAL = 0.89
VYMRNLLSQPSRAPRFWQERA

SEQ ID NO: 32817 - protein, 61 aa, Homo sapiens
  MAP TO AL096870.3; EXPRESSED IN BRAIN, SIGNAL = 0.4; EXPRESSED IN BONE MARROW, SIGNAL = 0.41; SWISSPROT HIT: P26770, EVALUE 1.00e-09
YSMHCCTLGFLSCSLFLHMSFELKLLLLLLWLAASCSLFLHSHAWLSECLIVRLYLGPLDS

SEQ ID NO: 32818 - protein, 18 aa, Homo sapiens
  MAP TO AL096870.3; EXPRESSED IN BRAIN, SIGNAL = 0.4; EXPRESSED IN BONE MARROW, SIGNAL = 0.41
TPCTAARWASSPAPSFCT

SEQ ID NO: 32819 - protein, 45 aa, Homo sapiens
  MAP TO AC008507.6; EXPRESSED IN BONE MARROW, SIGNAL = 0.72
RGEVSTIHLSQVVQWQWGPHALYTVVVLLEEGEQLSPGDLGTGFI

SEQ ID NO: 32820 - protein, 97 aa, Homo sapiens
  MAP TO AC010336.5; EXPRESSED IN BONE MARROW, SIGNAL = 1.2; SWISSPROT HIT: Q15717, EVALUE 3.00e-53
FSPMGVDHMSGLSGVNVPGNASSGWCIFIYNLGQDADEGILWQMFGPFGAVTNVKVIRDFNTNKCKGFGFVTMTNYEEAAMAIASLNGYRLGDKILQ

SEQ ID NO: 32821 - protein, 32 aa, Homo sapiens
  MAP TO AC010186.6; EXPRESSED IN BONE MARROW, SIGNAL = 0.53; SWISSPROT HIT: Q02282, EVALUE 3.00e+00
SPRQRPRLPQKVWTRNTCPLGDWLNFARHLQN

SEQ ID NO: 32822 - protein, 41 aa, Homo sapiens
  MAP TO AC006479.2; EXPRESSED IN BONE MARROW, SIGNAL = 0.49
FAGCAGSTVLASSSGEGLTVLASSSGEGLRRLPIIVEDKGE

SEQ ID NO: 32823 - protein, 52 aa, Homo sapiens
  MAP TO AC008449.4; EXPRESSED IN BONE MARROW, SIGNAL = 0.51
VEYDFRQQEGRFHEVLQSLEEAEPVEEASPPPKSPAEPPAPEKQDLRRKTKK

SEQ ID NO: 32824 - protein, 18 aa, Homo sapiens
  MAP TO AC010339.6; EXPRESSED IN BONE MARROW, SIGNAL = 0.42
MAGGPWLSTNVQVHPLQQ

SEQ ID NO: 32825 - protein, 18 aa, Homo sapiens
  MAP TO AL050303.2; EXPRESSED IN BONE MARROW, SIGNAL = 1.3; EXPRESSED IN HELA, SIGNAL = 1.8; EXPRESSED IN BRAIN, SIGNAL = 1.5; EXPRESSED IN LUNG, SIGNAL = 1.1
EVNTTEELEALITDADEM

SEQ ID NO: 32826 - protein, 65 aa, Homo sapiens
  MAP TO AL050303.2; EXPRESSED IN BONE MARROW, SIGNAL = 1.3; EXPRESSED IN HELA, SIGNAL = 1.8; EXPRESSED IN BRAIN, SIGNAL = 1.5; EXPRESSED IN LUNG, SIGNAL = 1.1; SWISSPROT HIT: P05106, EVALUE 3.20e+00
WKPWNCWDLPMWIRNEICLGPLNTGGGPWSCVTRGVSTCPNWSPHSWSWPMTIPGRSTPPRSWRR

SEQ ID NO: 32827 - protein, 870 aa, Homo sapiens
  MAP TO Z84487.2; EXPRESSED IN HEART, SIGNAL = 1.5; EXPRESSED IN BONE MARROW, SIGNAL = 0.74; EXPRESSED IN LUNG, SIGNAL = 1.1; EXPRESSED IN PLACENTA, SIGNAL = 1.8; SWISSPROT HIT: P46100, EVALUE 0.00e+00
QATDNSEISSATKLRQLKAFKSVLADIKKAHLALEEDLNSEFRAMDAVNKEKNTKEHKVIDAKFETKARKGEKPCALEKKDISKSEAKLSRKQVDSEHMHQNVPTEEQRTNKSTGGEHKKSDRKEEPQYEPANTSEDLDMDIVSVPSSVPEDIFENLETAMEVQSSVDHQGDGSSGTEQEVESSSVKLNISSKDNRGGIKSKTTAKVTKELYVKLTPVSLSNSPIKGADCQEVPQDKDGYKSCGLNPKLEKCGLGQENSDNEHLVENEVSLLLEESDLRRSPRVKTTPLRRPTETNPVTSNSDEECNETVKEKQKLSVPVRKKDKRNSSDSAIDNPKPNKLPKSKQSETVDQNSDSDEMLAILKEVSRMSHSSSSDTDINEIHTNHKTLYDLKTQAGKDDKGKRKRKSSTSGSDFDTKKGKSAKSSIISKKKRQTQSESSNYDSELEKEIKSMSKIGAARTTKKRIPNTKDFDSSEDEKHSKKGMDNQGHKNLKTSQEGSSDDAERKQERETFSSAEGTVDKDTTIMELRDRLPKKQQASASTDGVDKLSGKEQSFTSLEVRKVAETKEKSKHLKTKTCKKVQDGLSDIAEKFLKKDQSDETSEDDKKQSKKGTEEKKKPSDFKKKVIKMEQQYESSSDGTEKLPEREEICHFPKGIKQIKNGTTDGEKKSKKIRDKTSKKKDELSDYAEKSTGKGDSCDSSEDKKSKNGAYGREKKRCKLLGKSSRKRQDCSSSDTEKYSMKEDGCNSSDKRLKRIELRERRNLSSKRNTKEIQSGSSSSDAEESSEDNKKKKQRTSSKKKAVIVKEKKRNSLRTSTKRKQADITSSSSSDIEDDDQNSIGEGSSDEQKIKPVTENLVLSSHTGFCQSS

SEQ ID NO: 32828 - protein, 29 aa, Homo sapiens
  MAP TO AC005336.1; EXPRESSED IN HEART, SIGNAL = 1.3; EXPRESSED IN BONE MARROW, SIGNAL = 0.83
MPRWASCLRNTSTCAATPLYTSCGTSEGS

SEQ ID NO: 32829 - protein, 404 aa, Homo sapiens
  MAP TO AL121747.19; EXPRESSED IN HELA, SIGNAL = 1.2; EXPRESSED IN BRAIN, SIGNAL = 1.4; EXPRESSED IN PLACENTA, SIGNAL = 1.6; EXPRESSED IN LUNG, SIGNAL = 1.3; EXPRESSED IN HEART, SIGNAL = 1.6; EXPRESSED IN BONE MARROW, SIGNAL = 1.5; SWISSPROT HIT: Q04832, EVALUE 4.00e-08
MATGGGAEEERKRGRPQLLPPARPAARGEEADGGREKMGWAQVVKNLAEKKGEFREPRPPRREEESGGGGGSAGLGGPAGLAAPDLGDFPPAGRGDPKGRRRDPAGEAVDPRKKKGAAEAGRRKKAEAAAAAMATPARPGEAEDAAERPLQDEPAAAAAGPGKGRFLVRICFQGDEGACPTRDFVVGALILRSIGMDPSDIYAVIQIPGSREFDVSFRSAEKLALFLRVYEEKREQEDCWENFVVLGRSKSSLKTLFILFRNETVDVEDIVTWLKRHCDVLAVPVKVTDRFGIWTGEYKCEIELRQGEGGVRHLPGAFFLGAERGYSWYKGQPKTCFKCGSRTHMSGSCTQDRCFRCGEEGHLSPYCRKGIVCNLCGKRGHAFAQCPKAVHNSVAAQLTGVAGH

SEQ ID NO: 32830 - protein, 43 aa, Homo sapiens
  MAP TO AL121747.19; EXPRESSED IN HELA, SIGNAL = 1.2; EXPRESSED IN BRAIN, SIGNAL = 1.4; EXPRESSED IN PLACENTA, SIGNAL = 1.6; EXPRESSED IN LUNG, SIGNAL = 1.3; EXPRESSED IN HEART, SIGNAL = 1.6; EXPRESSED IN BONE MARROW, SIGNAL = 1.5
WPPAAARRKRGNGGGRSFCPPRGPRPGARRPTAAARRWAGPRW

SEQ ID NO: 32831 - protein, 174 aa, Homo sapiens
  MAP TO AC006213.1; EXPRESSED IN HELA, SIGNAL = 2.2; EXPRESSED IN BRAIN, SIGNAL = 0.95; EXPRESSED IN BONE MARROW, SIGNAL = 1.1; EXPRESSED IN FETAL LIVER, SIGNAL =   1; SWISSPROT HIT: Q14585, EVALUE 5.00e-67
KPYKCKECGKAFGHRSSLYQHKKIHSGEKPYKCEQCEKAFVRSYLLVEHQRSHTGEKPHECMECGKAFSKGSSLLKHKRIHSSEKLYDCKDCGKAFCRGSQLTQHQRIHTGEKPHECKECGKTFKLHSYLIQHQIIHTDLKPYECKQCGKAFSRVGDLKTHQSIHAGEKPYECK

SEQ ID NO: 32832 - protein, 89 aa, Homo sapiens
  MAP TO AC006213.1; EXPRESSED IN HELA, SIGNAL = 2.2; EXPRESSED IN BRAIN, SIGNAL = 0.95; EXPRESSED IN BONE MARROW, SIGNAL = 1.1; EXPRESSED IN FETAL LIVER, SIGNAL =   1; SWISSPROT HIT: P38149, EVALUE 2.80e+00
LLNIKEVILVRNLMNAWNVERLLVRAQAFLNIREFIVVRNSMIVRIVERPFVEALNLHSIREFILVRSHMNVKNVGRLLSFIHILFNIR

SEQ ID NO: 32833 - protein, 157 aa, Homo sapiens
  MAP TO AL355840.2; EXPRESSED IN BRAIN, SIGNAL = 1.1; EXPRESSED IN HELA, SIGNAL = 2.2; EXPRESSED IN BONE MARROW, SIGNAL = 1.1; EXPRESSED IN LUNG, SIGNAL = 1.1; SWISSPROT HIT: Q03297, EVALUE 9.50e+00
AGAGRGFPACARCQSRSGACARYLRPTRAAGSLLSRPPPHPTPAAWPQPTRPFVSPRNGAGTAQGRAPWTQLALGLALSATARLAPPRALPQSVAPKAPLSGGGGSCFRFFLSVRSGVASSTQPPFPLPHRGAAAAEGCGFGSCDGERRRPPLLPPG

SEQ ID NO: 32834 - protein, 63 aa, Homo sapiens
  MAP TO AL355840.2; EXPRESSED IN BRAIN, SIGNAL = 1.1; EXPRESSED IN HELA, SIGNAL = 2.2; EXPRESSED IN BONE MARROW, SIGNAL = 1.1; EXPRESSED IN LUNG, SIGNAL = 1.1
PLPIPPPPPGPSRPVPSSPRGMGPALLRVARPGPSSLSVSRCQRLPGSRRLALCLSQWRRRLR

SEQ ID NO: 32835 - protein, 35 aa, Homo sapiens
  MAP TO Z68165.1; EXPRESSED IN HELA, SIGNAL =   1; EXPRESSED IN LUNG, SIGNAL = 0.92; EXPRESSED IN BONE MARROW, SIGNAL =   1; SWISSPROT HIT: P15269, EVALUE 8.60e+00
PHLPGKPAAHQRSPAPRAPRCQRSSSSGRPCTTAA

SEQ ID NO: 32836 - protein, 178 aa, Homo sapiens
  MAP TO Z68165.1; EXPRESSED IN HELA, SIGNAL =   1; EXPRESSED IN LUNG, SIGNAL = 0.92; EXPRESSED IN BONE MARROW, SIGNAL =   1
VPTVWGPAAGQQLARVQTSYLRVWKGLRPLALFLWLGLLGPVPWLGATGSSCQRVAGQRRGAEPVTSRSTRVWEQGGGPAPSPGPGLLAAPSSREASRPPEEPSAPSPTLPAQFKQRAPMYNSGLSPATPTPAAPTSPLTPTTPPAVAPTTQTPPVAMVAPQTQAPAQQQPKKNLSLT

SEQ ID NO: 32837 - protein, 271 aa, Homo sapiens
  MAP TO AL117328.5; EXPRESSED IN BRAIN, SIGNAL = 1.1; EXPRESSED IN HELA, SIGNAL = 1.1; EXPRESSED IN BONE MARROW, SIGNAL =   1; EXPRESSED IN LUNG, SIGNAL =   1; SWISSPROT HIT: P19028, EVALUE 2.80e+00
DMSVSEKCGREEALVGSSPHLPALHYDEPAENLAEKSLPLPKSTSGSRRRSAVWKHFYLSPLDNSKAVCIHCMNEFSRGKNGKDLGTSCLIRHMWRAHRAIVLQENGGTGIPPLYSTPPTLLPSLLPPEGELSSVSSSPVKPVRESPSASSSPDRLTEDLQSHLNPGDGLMEDVAAFSSSDDIGEASASSPEKQQADGLSPRLFESGAIFQQNKKVMKRLKSEVWHHFSLAPMDSLKAECRYCGCAISRGKKGDVGTSCLMRHLYRRHPEV

SEQ ID NO: 32838 - protein, 240 aa, Homo sapiens
  MAP TO AC027307.3; EXPRESSED IN BONE MARROW, SIGNAL = 2.3; EXPRESSED IN HEART, SIGNAL = 2.7; EXPRESSED IN PLACENTA, SIGNAL = 2.8; EXPRESSED IN BRAIN, SIGNAL = 2.1; EXPRESSED IN HELA, SIGNAL = 0.94; SWISSPROT HIT: P19878, EVALUE 1.90e+00
QAKPDPAAEGQVKQPPEPHKDLLAGEEGAAPGSQASTESSAHPPTAAPASPSGPGKALGVSLNATSGKSQSQSSATPSSGSQGQLPSGSGCGSRLSGRAQGQRRAQGSSHWSRQHTQPPGTSSSPSQSALPSSGPLQPPNVTSSPVSPMVQSPSSSNIPTQPPSKSSGKPEDAAPKTSGQRQKESSKQPASSASVPELVPCHSGTSLEYTSESTTEITCSWPHHRPPCLQHYWCLKHLAC

SEQ ID NO: 32839 - protein, 47 aa, Homo sapiens
  MAP TO AC027307.3; EXPRESSED IN BONE MARROW, SIGNAL = 2.3; EXPRESSED IN HEART, SIGNAL = 2.7; EXPRESSED IN PLACENTA, SIGNAL = 2.8; EXPRESSED IN BRAIN, SIGNAL = 2.1; EXPRESSED IN HELA, SIGNAL = 0.94
HPTSPPARSHPWSSLPAAATSPRSPPASPLASRRTQPPRPADSARRN

SEQ ID NO: 32840 - protein, 197 aa, Homo sapiens
  MAP TO AC009948.2; EXPRESSED IN HELA, SIGNAL = 1.6; EXPRESSED IN BONE MARROW, SIGNAL = 0.87; EXPRESSED IN HEART, SIGNAL = 4.1; SWISSPROT HIT: P52179, EVALUE 4.00e-24
TPGPCPSVKVKEVSRDSVTITWEIPTIDGGAPVNNYIVEKREAAMRAFKTVTTKCSKTLYRISGLVEGTMYYFRVLPENIYGIGEPCETSDAVLVSEVPLVPAKLEVVDVTKSTVTLAWEKPLYDGGSRLTGYVLEACKAGTERWMKVVTLKPTVLEHTVTSLNEGEQYLFRIRAQNEKGVSEPRETVTAVTVQDLR

SEQ ID NO: 32841 - protein, 239 aa, Homo sapiens
  MAP TO AC022423.2; EXPRESSED IN LUNG, SIGNAL = 1.6; EXPRESSED IN BONE MARROW, SIGNAL = 1.2; EXPRESSED IN FETAL LIVER, SIGNAL = 1.3; EXPRESSED IN HELA, SIGNAL = 0.72; EXPRESSED IN HEART, SIGNAL = 1.7; SWISSPROT HIT: Q02362, EVALUE 3.30e-02
QRIKSFENLANADRPVAKSGASPFLSVSSKPPIGRRSSGSIVSGSLGHPGDAAARLLRRSLSSCSENQSEAGTLLPQMAKSPSIMTLTISRQNPPETSSKGSDSELKKSLGPLGIPTPTMTLASPVKRNKSSVRHTQPSPVSRSKLQELRALSMPDLDKLCSEDYSAGPSAVLFKTELEITPRRSPGPPAGGVSCPEKGGNRACPGGSGPKTSAAETPSSASDTGEAAQDLPFRRSWSV

SEQ ID NO: 32842 - protein, 177 aa, Homo sapiens
  MAP TO AL035662.21; EXPRESSED IN BRAIN, SIGNAL = 1.3; EXPRESSED IN HELA, SIGNAL = 1.7; EXPRESSED IN LUNG, SIGNAL = 1.1; EXPRESSED IN BONE MARROW, SIGNAL = 1.1; SWISSPROT HIT: P79995, EVALUE 2.00e-22
KSHLSSDEDEDMRDNVIKYNDEGGGEQDTEAYDMSALRSLYDFGELKGGDGGGSAGGGAGGGSGGGAGSPPQAHLPSERHSLPQGPPSPEPDFSVFRDFISRKVALADGDLSVPPYDAFQTYAFEGADSPAASLSSLHSGSSGSEQDFAYLSSWGPRFRPLAALYAGHRGDDEAQAS

SEQ ID NO: 32843 - protein, 103 aa, Homo sapiens
  MAP TO AL133325.13; EXPRESSED IN HELA, SIGNAL = 0.6; EXPRESSED IN BONE MARROW, SIGNAL = 0.98; EXPRESSED IN LUNG, SIGNAL = 0.95; SWISSPROT HIT: O95096, EVALUE 7.00e-46
HGLAAGAPPQDSSSKSPEPSADESPDNDKETPGGGGDAGKKRKRRVLFSKAQTYELERRFRQQRYLSAPEREHLASLIRLTPTQVKIWFQNHRYKMKRARAEK

SEQ ID NO: 32844 - protein, 96 aa, Homo sapiens
  MAP TO AL133325.13; EXPRESSED IN HELA, SIGNAL = 0.6; EXPRESSED IN BONE MARROW, SIGNAL = 0.98; EXPRESSED IN LUNG, SIGNAL = 0.95
CTVWLPGRPLRTQAPSPRSPRPTSHRTMTRRPRAAGGTPARSESGECFSPRRRPTSWSGAFGSSGTCRRPSANTWPASSASRPRRSRSGSRTTATR

SEQ ID NO: 32845 - protein, 241 aa, Homo sapiens
  MAP TO AP001052.1; EXPRESSED IN HELA, SIGNAL = 0.93; EXPRESSED IN BRAIN, SIGNAL = 0.94; EXPRESSED IN BONE MARROW, SIGNAL = 0.95; SWISSPROT HIT: Q14684, EVALUE 1.00e-101
SRVFCVEEEDSESSLQKRRRKKKKKHHLQPENPGPGGAAPSLEQNRGREPEASGLKALKARVAEPGAEATSSTGEESGSEHPPAVPMHNKRKRPRKKSPRAHREMLESAVLPPEDMSQSGPSGSHPQGPRGSPTGGAQLLKRKRKLGVVPVNGSGLSTPAWPPLQQEGPPTGPAEGANSHTTLPQRRRLQKKKAGPGSLELCGLPSQKTASLKKRKKMRVMSNLVEHNGVLESEAGQPQAL

SEQ ID NO: 32846 - protein, 252 aa, Homo sapiens
  MAP TO AC002094.1; EXPRESSED IN BONE MARROW, SIGNAL = 1.2; EXPRESSED IN HELA, SIGNAL = 2.5; EXPRESSED IN BRAIN, SIGNAL =   1; SWISSPROT HIT: P04004, EVALUE 1.00e-106
SCKGRCTEGFNVDKKCQCDELCSYYQSCCTDYTAECKPQGVFRAQVGGLGCPLLLETHYHPLSAVTRGDVFTMPEDEYTVYDDGEEKNNATVHEQVGGPSLTSDLQAQSKGNPEQTPVLKPEEEAPAPEVGASKPEGIDSRPETLHPGRPQPPAEEELCSGKPFDAFTDLKNGSLFAFRGESRAGTGDAGLPQERPCSHTISSTLGQYCYELDEKAVRPGYPKLIRDVWGIEGPIDAAFTRINCQGKTYLFK

SEQ ID NO: 32847 - protein, 59 aa, Homo sapiens
  MAP TO AC002094.1; EXPRESSED IN BONE MARROW, SIGNAL = 1.2; EXPRESSED IN HELA, SIGNAL = 2.5; EXPRESSED IN BRAIN, SIGNAL =   1; SWISSPROT HIT: Q9Y258, EVALUE 2.70e+00
ALRASTWTRSASVTSSALTTRAAAQTIRLSASPKVCSEPRWVGWGAPCCWRLTTIHSLQ

SEQ ID NO: 32848 - protein, 222 aa, Homo sapiens [sequence omitted]

SEQ ID NO: 32849 - protein, 33 aa, Homo sapiens
  MAP TO AC007608.2; EXPRESSED IN HELA, SIGNAL = 3.8; EXPRESSED IN BRAIN, SIGNAL = 2.3; EXPRESSED IN BONE MARROW, SIGNAL =   3; EXPRESSED IN LUNG, SIGNAL = 2.6; EXPRESSED IN FETAL LIVER, SIGNAL = 2.7
CTKSSSSRLGALTTTRPSWNGAIPTSRSSRKRC

SEQ ID NO: 32850 - protein, 33 aa, Homo sapiens
  MAP TO AL359236.1; EXPRESSED IN BONE MARROW, SIGNAL = 3.3; EXPRESSED IN LUNG, SIGNAL = 3.3; EXPRESSED IN PLACENTA, SIGNAL = 3.8; EXPRESSED IN BRAIN, SIGNAL = 2.2
WPGRAWCSGSSWRTSSTPRPWMCCTRFSPSSAQ

SEQ ID NO: 32851 - protein, 179 aa, Homo sapiens
  MAP TO AL359236.1; EXPRESSED IN BONE MARROW, SIGNAL = 3.3; EXPRESSED IN LUNG, SIGNAL = 3.3; EXPRESSED IN PLACENTA, SIGNAL = 3.8; EXPRESSED IN BRAIN, SIGNAL = 2.2; SWISSPROT HIT: Q00438, EVALUE 2.00e-44
RGTWPGLPRRHVDAGMAMAGQSLVLRIIVENLFYPTTLDVLHQIFSKFGTVKTITFIKDNQFQALLQYTDPENAQHTKLSLDWQNTYNACHTLCIDFSKLISLNVKYNNDKSRDYHARTCPPGTASPRWTRHGRGLRPFSSQHPRSPGPPAIPSAVAAAAAAGQIAILGLAGTGNSVLL

SEQ ID NO: 32852 - protein, 278 aa, Homo sapiens
  MAP TO AL121749.7; EXPRESSED IN LUNG, SIGNAL = 2.3; EXPRESSED IN HEART, SIGNAL = 2.7; EXPRESSED IN FETAL LIVER, SIGNAL = 1.9; EXPRESSED IN BONE MARROW, SIGNAL = 1.8; EXPRESSED IN HELA, SIGNAL = 1.2; SWISSPROT HIT: P18537, EVALUE 7.00e-56
RVKTGQIANCALPCHNPFFSQDERAFTVFWIGLWSVLCFVSTFATVSTFLIDMERFKYPERPIIFLSACYLFVSVGYLVRLVAGHEKVACSGGAPGAGGAGGAGGAAAGAGAAGAGAGGPGGRGEYEELGAVEQHVRYETTGPALCTVVFLLVYFFGMASSIWWVILSLTWFLAAGMKWGNEAIAGYSQYFHLAAWLVPSVKSIAVLALSSVDGDPVAGICYVGNQSLDNLRGFVLAPLVIYLFIGTMFLLAGFVSLFRIRSVIKQQDGPTKTHKLEK

SEQ ID NO: 32853 - protein, 163 aa, Homo sapiens
  MAP TO AP001046.1; EXPRESSED IN FETAL LIVER, SIGNAL = 1.6; EXPRESSED IN BONE MARROW, SIGNAL = 1.6; EXPRESSED IN LUNG, SIGNAL = 1.7; EXPRESSED IN PLACENTA, SIGNAL = 1.5; EXPRESSED IN BRAIN, SIGNAL = 1.5; EXPRESSED IN HELA, SIGNAL = 0.68; SWISSPROT HIT: Q62565, EVALUE 5.00e-04
EQTVYIHGYTFRQQAVYIHGYMFREQAVYIHGYTFREQAVYIHGYTFREQAVYIHGYTFRQQAVYIHGYTFREQAVYIHGYMFRQQQAVYIHGYMFRQQAVYIHGYMFRQQAVYIHGYMFRQQAVYIHGYMFRQQAVYIHGYMFRQQAVYIHGYMFRQQAVYL

SEQ ID NO: 32854 - protein, 155 aa, Homo sapiens
  MAP TO AL021392.5; EXPRESSED IN HELA, SIGNAL = 0.55; EXPRESSED IN BONE MARROW, SIGNAL = 0.86; EXPRESSED IN LUNG, SIGNAL = 1.3; EXPRESSED IN HEART, SIGNAL = 1.3; SWISSPROT HIT: Q14517, EVALUE 2.00e-16
DVQKYSLSIKAQDGGRPPLINSSGVVSVQVLDVNDNEPIFVSSPFQATVLENVPLGYPVVHIQAVDADSGENARLHYRLVDTASTFLGGGSAGPKNPAPTPDFPFQIHNSSGWITVCAELDREEVEHYSFGVEAVDHGSPPMSSSTSVSITVLDV

SEQ ID NO: 32855 - protein, 168 aa, Homo sapiens
  MAP TO AC004126.1; EXPRESSED IN BRAIN, SIGNAL = 0.93; EXPRESSED IN HELA, SIGNAL = 1.6; EXPRESSED IN HEART, SIGNAL = 1.2; EXPRESSED IN BONE MARROW, SIGNAL = 0.79
PGGSQVPWVSAPVVAERAPDRELADRGKALVILGPAVADAGGPPGSAPPYSGPTPRPVLPGPENTLVPPHLASADIVGIQDCTLAVFEATPGVGLADAGGTLRLALAALGVTPSLHPAADGVILGLSSAAFRGTPGQPAAHSEETRAPSFLLGSTRTPQGPVSSAKLR

SEQ ID NO: 32856 - protein, 48 aa, Homo sapiens
  MAP TO AC016212.3; EXPRESSED IN HELA, SIGNAL = 1.4; EXPRESSED IN BRAIN, SIGNAL = 1.6; EXPRESSED IN BONE MARROW, SIGNAL = 1.1; EXPRESSED IN LUNG, SIGNAL = 1.2
MFKSSARSWVRRLFSLLRFSGKPGCIGASGPEAASRSEAPRPPPLPRK

SEQ ID NO: 32857 - protein, 166 aa, Homo sapiens
  MAP TO AC005618.1; EXPRESSED IN BRAIN, SIGNAL = 1.9; EXPRESSED IN HELA, SIGNAL = 0.63; EXPRESSED IN LUNG, SIGNAL = 1.2; EXPRESSED IN HEART, SIGNAL = 2.2; EXPRESSED IN BONE MARROW, SIGNAL = 0.78; SWISSPROT HIT: Q9UN66, EVALUE 3.00e-48
LEPRELLSYVSVSPQSGVVFAQRAFDHEQLRAFELTLQARDQGSPALSANVSLRVLVGDLNDNAPRVLYPALGPDGSALFDMVPRAAEPGYLVTKVVAVDADSGHNAWLSYHVLQASEPGLFSLGLRTGEVRTARALGDRDAARQRLLVAVRDGGQPPLSATATLH

SEQ ID NO: 32858 - protein, 178 aa, Homo sapiens
  MAP TO AJ239329.2; EXPRESSED IN HELA, SIGNAL = 1.1; EXPRESSED IN BRAIN, SIGNAL = 1.3; EXPRESSED IN PLACENTA, SIGNAL = 2.3; EXPRESSED IN HEART, SIGNAL = 1.3; EXPRESSED IN BONE MARROW, SIGNAL = 1.2; EXPRESSED IN LUNG, SIGNAL = 0.99; SWISSPROT HIT: P02794, EVALUE 4.00e-62
YHHPSCEAAINTHISLELHASYVYLSMAFYFDQDDAALEHFDRYFLRQSQEKREHAQELMSLQNLRGGRICLHDIRKPEGQGWESGLKAMECTFHLEKNINQSLLELHQLARENGDPQLCDFLENDFLNQQAKTIKELGGYLSNLHKMGAPEAGLAEYLFNKLTLGRSQKHTRAQTGP

SEQ ID NO: 32859 - protein, 177 aa, Homo sapiens
  MAP TO Z77852.1; EXPRESSED IN HELA, SIGNAL = 1.8; EXPRESSED IN PLACENTA, SIGNAL = 5.8; EXPRESSED IN BRAIN, SIGNAL = 2.4; EXPRESSED IN HEART, SIGNAL = 3.1; EXPRESSED IN LUNG, SIGNAL = 4.5; EXPRESSED IN BONE MARROW, SIGNAL =   3; EXPRESSED IN FETAL LIVER, SIGNAL = 3.6; SWISSPROT HIT: Q9NSE2, EVALUE 7.00e-76
WYWGSITASEARQHLQKMPEGTFLVRDSTHPSYLFTLSVKTTRGPTNVRIEYADSSFRLDSNCLSRPRILAFPDVVSLVQHYVASCTADTRSDSPDPAPTPALPMPKEDAPSDPALPAPPPATAVHLKLVQPFVRRSSARSLQHLCRLVINRLVADVDCLPLPRRMADYLRQYPFQL

SEQ ID NO: 32860 - protein, 24 aa, Homo sapiens
  MAP TO Z77852.1; EXPRESSED IN HELA, SIGNAL = 1.8; EXPRESSED IN PLACENTA, SIGNAL = 5.8; EXPRESSED IN BRAIN, SIGNAL = 2.4; EXPRESSED IN HEART, SIGNAL = 3.1; EXPRESSED IN LUNG, SIGNAL = 4.5; EXPRESSED IN BONE MARROW, SIGNAL =   3; EXPRESSED IN FETAL LIVER, SIGNAL = 3.6
AGIGVPLRPARPDNTCRRCQKARS

SEQ ID NO: 32861 - protein, 26 aa, Homo sapiens
  MAP TO Z77852.1; EXPRESSED IN HELA, SIGNAL = 1.8; EXPRESSED IN PLACENTA, SIGNAL = 5.8; EXPRESSED IN BRAIN, SIGNAL = 2.4; EXPRESSED IN HEART, SIGNAL = 3.1; EXPRESSED IN LUNG, SIGNAL = 4.5; EXPRESSED IN BONE MARROW, SIGNAL =   3; EXPRESSED IN FETAL LIVER, SIGNAL = 3.6
LVLGFHYGQRGPTTPAEDARRHVLST

SEQ ID NO: 32862 - protein, 203 aa, Homo sapiens
  MAP TO AC005756.1; EXPRESSED IN BRAIN, SIGNAL = 3.7; EXPRESSED IN HELA, SIGNAL = 4.6; EXPRESSED IN HEART, SIGNAL = 3.1; EXPRESSED IN BONE MARROW, SIGNAL = 3.5
ADTRRHTQTGRHTQTHAGTRRHAGTRRHAGTRRHTQTCRHTQAHADTQAHAGTCRHAGTRRHTQTGRHTQTRRHTHTQAHADTQAHAGTCRHAGTHRHADTRRHTQTGRHTQTRRHTQTQAHAGTRRHAGTRRHTQTHRHIQTHKGRHMQTQAHAGRHTHAHTQVHADMQTHTQTHTDTCSHSGTRRHADTHTDTHRTRHTDA

SEQ ID NO: 32863 - protein, 381 aa, Homo sapiens
  MAP TO AP001731.1; EXPRESSED IN HELA, SIGNAL = 1.1; EXPRESSED IN BONE MARROW, SIGNAL = 1.5; SWISSPROT HIT: Q99712, EVALUE 0.00e+00
CFQSLAMDAIHIGMSSTPLVKHTAGAGLKANRPRVMSKSGHSNVRIDKVDGIYLLYLQDLWTTVIDMKWRYKLTLFAATFVMTWFLFGVIYYAIAFIHGDLEPGEPISNHTPCIMKVDSLTGAFLFSLESQTTIGYGVRSITEECPHAIFLLVAQLVITTLIEIFITGTFLAKIARPKKRAETIKFSHCAVITKQNGKLCLVIQVANMRKSLLIQCQLSGKLLQTHVTKEGERILLNQATVKFHVDSSSESPFLILPMTFYHVLDETSPLRDLTPQNLKEKEFELVVLLNATVESTSAVCQSRTSYIPEEIYWGFEFVPVVSLSKNGKYVADFSQFEQIRKSPDCTFYCADSEKQQLEEKYRQEDQRERELRTLLLQQSNV

SEQ ID NO: 32864 - protein, 192 aa, Homo sapiens
  MAP TO AL021937.1; EXPRESSED IN PLACENTA, SIGNAL = 1.6; EXPRESSED IN BRAIN, SIGNAL = 2.7; EXPRESSED IN HELA, SIGNAL = 0.57; EXPRESSED IN HEART, SIGNAL = 1.8; EXPRESSED IN BONE MARROW, SIGNAL = 1.6; EXPRESSED IN LUNG, SIGNAL =   2; EXPRESSED IN FETAL LIVER, SIGNAL = 1.8; SWISSPROT HIT: O15553, EVALUE 2.00e-35
DMTLDADTANNFLLISDDLRSVRSGLITQNRQDLAERFDVSVCILGSPRFTCGRHYWEVDVGTSTEWDLGVCRESVHCKGKIQLTTELGFWTVSLRDGSRLSASTVPLTFLLVDRKLQRVGIFLDMGMQNVSFFDAESGSHVYTFRSVSAEEPLRPFLAPSIPPNGDQGVLSICPLMNSGTTDAPVRPGEAK

SEQ ID NO: 32865 - protein, 28 aa, Homo sapiens
  MAP TO AL021937.1; EXPRESSED IN PLACENTA, SIGNAL = 1.6; EXPRESSED IN BRAIN, SIGNAL = 2.7; EXPRESSED IN HELA, SIGNAL = 0.57; EXPRESSED IN HEART, SIGNAL = 1.8; EXPRESSED IN BONE MARROW, SIGNAL = 1.6; EXPRESSED IN LUNG, SIGNAL =   2; EXPRESSED IN FETAL LIVER, SIGNAL = 1.8; SWISSPROT HIT: P39304, EVALUE 8.70e+00
TGRWTWEQAQNGTWESAENLFTAKGRSS

SEQ ID NO: 32866 - protein, 187 aa, Homo sapiens
  MAP TO AL121760.4; EXPRESSED IN BONE MARROW, SIGNAL = 1.3; EXPRESSED IN LUNG, SIGNAL = 1.2; EXPRESSED IN FETAL LIVER, SIGNAL = 1.4; EXPRESSED IN HELA, SIGNAL = 1.2; SWISSPROT HIT: P14546, EVALUE 6.40e-02
ECHLLREVFPDYPNRFLHRVTLSCCFVPIFIVFRVTLSCCFVPVFIVFRVTLSCCFVPIFIVFRVTLSCCFVPIFIVFRVTLSCCFVPIFIVFRVTLRCCFVPVFTIFRVTLSCCFVPIFIVFRVTLRCCFVPVFTVFRVTLRCCFVPVFTVFRVTLSCCFVPIFIVFRVTLSCCFVPVFIVFRRRL

SEQ ID NO: 32867 - protein, 247 aa, Homo sapiens
  MAP TO Z73417.1; EXPRESSED IN HELA, SIGNAL = 0.81; EXPRESSED IN BRAIN, SIGNAL = 0.84; EXPRESSED IN HEART, SIGNAL = 1.2; EXPRESSED IN BONE MARROW, SIGNAL = 0.89; EXPRESSED IN FETAL LIVER, SIGNAL =   1; SWISSPROT HIT: P51811, EVALUE 6.00e-48
VLMVFSLVSVTYGATLCNMLAIQIKYDDYKIRLGPLEVLCITIWRTLEITSRLLILVLFSATLKLKAVPFLVLNFLIILFEPWIKFWRSGAQMPNNIEKNFSRVGTLVVLISVTILYAGINFSCWSALQLRLADRDLVDKGQNWGHMGLHYSVRLVENVIMVLVFKFFGVKVLLNYCHSLIALQLIIAYLISIGFMLLFFQYLHPLRSLFTHNVVDYLHCVCCHQHPRTRVENSEPPFETEARQSVV

SEQ ID NO: 32868 - protein, 33 aa, Homo sapiens
  MAP TO Z73417.1; EXPRESSED IN HELA, SIGNAL = 0.81; EXPRESSED IN BRAIN, SIGNAL = 0.84; EXPRESSED IN HEART, SIGNAL = 1.2; EXPRESSED IN BONE MARROW, SIGNAL = 0.89; EXPRESSED IN FETAL LIVER, SIGNAL =   1
WYFPWYLSPMGPPFAICWLSRSSTMTTRFALGH

SEQ ID NO: 32869 - protein, 27 aa, Homo sapiens
  MAP TO Z73417.1; EXPRESSED IN HELA, SIGNAL = 0.81; EXPRESSED IN BRAIN, SIGNAL = 0.84; EXPRESSED IN HEART, SIGNAL = 1.2; EXPRESSED IN BONE MARROW, SIGNAL = 0.89; EXPRESSED IN FETAL LIVER, SIGNAL =   1
CANGIFPGICHLWGHPLQYVGYPDQVR

SEQ ID NO: 32870 - protein, 319 aa, Homo sapiens
  MAP TO AC005070.1; EXPRESSED IN HELA, SIGNAL = 1.6; EXPRESSED IN BONE MARROW, SIGNAL = 2.7; EXPRESSED IN FETAL LIVER, SIGNAL = 1.7; SWISSPROT HIT: P05143, EVALUE 5.00e-07
NSTAPPPPPPPPPSSSYYQNQQPSANFQNYNQLKGSLSQQTVFTSGPNQALPGTTSQQTVPGHHVTPGHFLPSQNPTIHHQTAAAVVPPPPPPPPAPGPHLVQQPNSHQQHSVAHVVGPVHAVTPGSHIHSQTAGHHLPPPPPPPGPAPHHHPPPHPSTGLQGLQAQHQHVVNSAPPPPPPPPPSSVLASGHHTTSAQALHHPPHQGPPLFPSSAHPTVPPYPSQATHHTTLGPGPQHQPSGTGPHCPLPVTGPHLQPQGPNSIPTPTASGFCPHPGSVALPHGVQGPQQASPVPGQIPIHRAQVPPTFQNNYHGSGWH

SEQ ID NO: 32871 - protein, 368 aa, Homo sapiens
  MAP TO AC012571.3; EXPRESSED IN PLACENTA, SIGNAL = 1.6; EXPRESSED IN BRAIN, SIGNAL = 1.5; EXPRESSED IN HELA, SIGNAL = 2.6; EXPRESSED IN HEART, SIGNAL =   2; EXPRESSED IN BONE MARROW, SIGNAL = 1.1; EXPRESSED IN LUNG, SIGNAL = 1.5; SWISSPROT HIT: P22290, EVALUE 1.40e-02
MCLLPRGFEPQAPEDLAQRSLVELREMLKLQERLLRNEKFICKLPDKGKKIFDSFAKLKAAIAECEEVRRKNELFHPVSLDCKLRQKAIAEVDVGTDKARNSDPILDTSSLVPGCSSVDNIKSSQTSQNQGLGRPTLEGDEETSEVEYTVNKGPASSNRDRVPPSSEASEHHPQHRVSSQAEDTSSSFDNLFIDRLQRITIADQGEQQSEENASTKNLTGLSSGTQKKPHYMEVLEMRAKNPGPQLRKFKTNVLPFRQNDSSSHCQKSGSPISSKERRRRDKQHLDDITAARLLPLHHMPTQLLSIEESLALQKQQKQNYEEMQAKLAAQKLAERPNIKMRSYNPEGESSGRYREVRDEDDDWSSDEF

SEQ ID NO: 32872 - protein, 27 aa, Homo sapiens
  MAP TO AC012571.3; EXPRESSED IN PLACENTA, SIGNAL = 1.6; EXPRESSED IN BRAIN, SIGNAL = 1.5; EXPRESSED IN HELA, SIGNAL = 2.6; EXPRESSED IN HEART, SIGNAL =   2; EXPRESSED IN BONE MARROW, SIGNAL = 1.1; EXPRESSED IN LUNG, SIGNAL = 1.5
CACCPAASSPKLPRTWRSGVWWSCGKC

SEQ ID NO: 32873 - protein, 82 aa, Homo sapiens
  MAP TO AP001629.1; EXPRESSED IN HELA, SIGNAL = 0.88; EXPRESSED IN LUNG, SIGNAL = 1.3; EXPRESSED IN BONE MARROW, SIGNAL = 1.4; SWISSPROT HIT: P47170, EVALUE 5.70e+00
VDEECLVGKRLCVSRVIHKELFTDRVDEECLVGKHLCVSRVIHKELFTDRVDEECLVGKRLYVSQVIHKELFTDRDDEECLV

SEQ ID NO: 32874 - protein, 51 aa, Homo sapiens
  MAP TO AP001629.1; EXPRESSED IN HELA, SIGNAL = 0.88; EXPRESSED IN LUNG, SIGNAL = 1.3; EXPRESSED IN BONE MARROW, SIGNAL = 1.4; SWISSPROT HIT: P56181, EVALUE 9.00e-26
PAPVPAEPFDNTTYKNLQHHDYSTYTFLDLNLELSKFRMPQPSSGRESPRH

SEQ ID NO: 32875 - protein, 27 aa, Homo sapiens
  MAP TO AL136293.3; EXPRESSED IN PLACENTA, SIGNAL = 1.9; EXPRESSED IN HELA, SIGNAL = 2.4; EXPRESSED IN BRAIN, SIGNAL = 2.2; EXPRESSED IN BONE MARROW, SIGNAL = 2.4
KVEAGAPVTAPWNRHPAPNFLGTVPSP

SEQ ID NO: 32876 - protein, 233 aa, Homo sapiens
  MAP TO AL136293.3; EXPRESSED IN PLACENTA, SIGNAL = 1.9; EXPRESSED IN HELA, SIGNAL = 2.4; EXPRESSED IN BRAIN, SIGNAL = 2.2; EXPRESSED IN BONE MARROW, SIGNAL = 2.4; SWISSPROT HIT: O15040, EVALUE 0.00e+00
GGSRSTCHSSLESTPCSEFPGDSPQSLNTDLLSMTSSVLGSSVDQLSAESPDQESSFNGEVNGVPQENTDPETFNVLEVSGSMPDSLAEEDDIRTEMPHCHHAHGRELLNGAREDVGGSDVTGLGDEPCPADDGPNSTQLPFQEQDSSPGAHDGEDIQPIGPQSTFCEVPLLNSLTVPSSLSWAPSAEQWLPGTRADEGSPVEPSQEQDILTSMEASGHLSTNLWHAVTDDDT

SEQ ID NO: 32877 - protein, 160 aa, Homo sapiens
  MAP TO D87018.1; EXPRESSED IN BRAIN, SIGNAL = 0.91; EXPRESSED IN BONE MARROW, SIGNAL = 1.1; SWISSPROT HIT: P12018, EVALUE 2.00e-24
SLSQPVLTQPSSHSASSGASVRLTCMLSSGFSVGDFWIRWYQQKPGNPPRYLLYYHSDSNKGQGSGVPSRFSGSNDASANAGILRISGLQPEDEADYYCGTWHSNSKTHTVLQTHEEVRQNPPLYSPGLVKSPLLVALTKSSSGGDICCLIDSTGAPTEK

SEQ ID NO: 32878 - protein, 60 aa, Homo sapiens
  MAP TO D87018.1; EXPRESSED IN BRAIN, SIGNAL = 0.91; EXPRESSED IN BONE MARROW, SIGNAL = 1.1; SWISSPROT HIT: P33930, EVALUE 2.70e+00
TPIRAKALEFPAASLDPTMHQPMQGFCVSLGSSLRMRLTITVVHGTATLRLTQCSRPMRK

SEQ ID NO: 32879 - protein, 60 aa, Homo sapiens
  MAP TO D87018.1; EXPRESSED IN BRAIN, SIGNAL = 0.91; EXPRESSED IN BONE MARROW, SIGNAL = 1.1
FPLPACADSAIFPFCIFWSISQTHLHAEQWLQCWGLLDKVVPTKAREPSPVSPVLPLRLQ

SEQ ID NO: 32880 - protein, 379 aa, Homo sapiens
  MAP TO AC005020.1; EXPRESSED IN LUNG, SIGNAL = 1.1; EXPRESSED IN PLACENTA, SIGNAL = 1.9; EXPRESSED IN HELA, SIGNAL = 2.1; EXPRESSED IN BONE MARROW, SIGNAL = 1.2; EXPRESSED IN FETAL LIVER, SIGNAL = 1.1; SWISSPROT HIT: Q9Y2L8, EVALUE 0.00e+00
SDKRSKNTKLSVKKKISEYSEADMELSGKTQRNVSQVQDFGEGCEFQGKLDRKQGIPMKEILGQPSSKRMNYSEVPYVHKKSSTGERPHKCNECGKSFIQSAHLIQHQRIHTGEKPFRCEECGKSYNQRVHLTQHQRVHTGEKPYTCPLCGKAFRVRSHLVQHQSVHSGERPFKCNECGKGFGRRSHLAGHLRLHSREKSHQCRECGEIFFQYVSLIEHQVLHMGQKNEKNGICEEAYSWNLTVIEDKKIELQEQPYQCDICGKAFGYSSDLIQHYRTHTAEKPYQCDICRENVGQCSHTKQHQKIYSSTKSHQCHECGRGFTLKSHLNQHQRIHTGEKPFQCKECGMNFSWSCSLFKHLRSHERTDPINTLSVEGSLL

SEQ ID NO: 32881 - protein, 81 aa, Homo sapiens
  MAP TO AC004794.1; EXPRESSED IN BRAIN, SIGNAL = 0.78; EXPRESSED IN HELA, SIGNAL = 1.3; EXPRESSED IN BONE MARROW, SIGNAL = 0.78
WNQKSKPKSQNSSSRDSQKSQSIRPSSSQCSSPHTWSPSLEMPSLSWPSSRTLTSTHPCTSFSSTSHSLTPYYPPPPSPRC

SEQ ID NO: 32882 - protein, 357 aa, Homo sapiens
  MAP TO AC004794.1; EXPRESSED IN BRAIN, SIGNAL = 0.78; EXPRESSED IN HELA, SIGNAL = 1.3; EXPRESSED IN BONE MARROW, SIGNAL = 0.78; SWISSPROT HIT: O60431, EVALUE 0.00e+00
PYMEPEKQTEISEFFLQGLSEKPEHQTLLFTMFLSTYLVTIIGNALIILAIITDSHLHTPMYFFLFNLSLVDTLLSSTTVPKMLANIQAQSRAIPFVGCLTQMYAFHLFGTMDSFLLAVMAIDRFVAIVHPQRYLVLMCSPVCGLLLGASWMITNLQSLIHTCLMAQLTFCAGSEISHFFCDLMPLLKLSGSDTHTNELVIFAFGIVVGTSPFSCILLSYIRIFWTVFKIPSTRGKWKAFSTCGLHLTVVSLSYGTIFAVYLQPTSPSSSQKDKAAALMCGVFIPMLNPFIYSIRNKDMKAALGKLIGKVAVPCPRPEQLLDVYHVPGSLLAARDTEMHPIPYPGGVQSLAGNRDME

SEQ ID NO: 32883 - protein, 243 aa, Homo sapiens
  MAP TO L76568.1; EXPRESSED IN BONE MARROW, SIGNAL = 0.86; EXPRESSED IN BRAIN, SIGNAL = 0.85; EXPRESSED IN HELA, SIGNAL = 0.63; SWISSPROT HIT: Q92889, EVALUE 0.00e+00
GQEQNGTQQSIVVDMREFRSELPSLIHRRGIDIEPVTLEVGDYILTPEMCVERKSISDLIGSLNNGRLYSQCISMSRYYKRPVLLIEFDPSKPFSLTSRGALFQEISSNDISSKLTLLTLHFPRLRILWCPSPHATAELFEELKQSKPQPDAATALAITADSETLPESEKYNPGPQDFLLKMPGVNAKNCRSLMHHVKNIAELAALSQDELTSILGNAANAKQLYDFIHTSFAEVVSKGKGKK

SEQ ID NO: 32884 - protein, 160 aa, Homo sapiens
  MAP TO AC016212.3; EXPRESSED IN HELA, SIGNAL = 3.4; EXPRESSED IN BRAIN, SIGNAL = 1.7; EXPRESSED IN BONE MARROW, SIGNAL = 1.9; EXPRESSED IN LUNG, SIGNAL = 2.3; SWISSPROT HIT: P11161, EVALUE 2.00e-81
CQRDLHGTAGPDRKPFPCPLDTLRVPPPLTPLSTIRNFTLGGPSAGVTGPGASGGSEGPRLPGSSSAAAAAAAAAAYNPHHLPLRPILRPRKYPNRPSKTPVHERPYPCPAEGCDRRFSRSDELTRHIRIHTGHKPFQCRICMRNFSRSDHLTTHIRTHT

SEQ ID NO: 32885 - protein, 46 aa, Homo sapiens
  MAP TO AC016212.3; EXPRESSED IN HELA, SIGNAL = 3.4; EXPRESSED IN BRAIN, SIGNAL = 1.7; EXPRESSED IN BONE MARROW, SIGNAL = 1.9; EXPRESSED IN LUNG, SIGNAL = 2.3
ARETYMVQLAQTVSPFPAHWTPCGCPLHSLHSLQSVTLPWGAPVLG

SEQ ID NO: 32886 - protein, 289 aa, Homo sapiens
  MAP TO AC007228.1; EXPRESSED IN HELA, SIGNAL = 1.5; EXPRESSED IN BRAIN, SIGNAL = 0.89; EXPRESSED IN BONE MARROW, SIGNAL = 0.85; SWISSPROT HIT: P10078, EVALUE 1.00e-123
VCGKAFSHGSSLTVHQRIHTGEKPYECNICEKAFSHRGSLTLHQRVHTGEKPYECKECGKAFRQSTHLAHHQRIHTGEKPYECKECSKTFSQNAHLAQHQKIHTGEKPYECKECGKAFSQIAHLVQHQRVHTGEKPYECIECGKAFSDGSYLVQHQRLHSGKRPYECLECGKAFRQRASLICHQRCHTGEKPYECNVCGKAFSHRKSLTLHQRIHTGEKPYECKECSKAFSQVAHLTLHKRIHTGERPYECKECGKAFRQSVHLAHHQRIHTGESSVILSSALPYHQVL

SEQ ID NO: 32887 - protein, 307 aa, Homo sapiens
  MAP TO AF123462.1; EXPRESSED IN HELA, SIGNAL = 0.54; EXPRESSED IN BONE MARROW, SIGNAL = 0.97; EXPRESSED IN LUNG, SIGNAL = 1.1; SWISSPROT HIT: P11388, EVALUE 4.20e+00
GELVIPLLVEDPLATPPIATRAPSITLPPTFRPLLTIIETTKDSLSMTSEAGLPCLSDQGSDGCDDDGLVISGYGSGETFDSNLPPTDDEDFYTTFSLVTDKSLSTSIFEGGYKAHAPKWESKDFRPNKVSETSRTTTTSLSPELIRFTASSSSGMVPKLPAGKMNNRDLKPQPDIVLLPLPTAYELDSTKLKSPLITSPMFRNVPTANPTEPGIRRVPGASEVIRESSSTTGMVVGIVAAAALCILILLYAMYKYRNRDEGSYQVDETRNYISNSAQSNGTLMKEKQQSSKSGHKKQKNKDREYYV

SEQ ID NO: 32888 - protein, 371 aa, Homo sapiens
  MAP TO AL049840.4; EXPRESSED IN HELA, SIGNAL = 0.98; EXPRESSED IN BONE MARROW, SIGNAL = 0.81; SWISSPROT HIT: Q13625, EVALUE 6.00e-28
YGKPVLPSGSTSPSPLPFLHGSLSTGTPQPQPPSESTEKEPEQDGPAAPADGSTVESLPRPLSPTKLTPIVHSPLRYQSDADLEALRRKLANAPRPLKKRSSITEPEGPGGPNIQKLLYQRFNTLAGGMEGTPFYQPSPSQDFMGTLADVDNGNTNANGNLEELPPAQPTAPLPAEPAPSSDANDNELPSPEPEELICPQTTHQTAEPAEDNNNNVATVPTTEQIPSPVAEAPSPGEEQVPPAPLPPASHPPATSTVGVIARPKPGLPGHSCNQDLWGPSLGQAVLGAVGTRDVPELRLVGRTDSHTDKWGMKRHDKWGSATQMHNVAKPFPDSWSGSSRGFPEEGELSLAPEGPVERRGKKHLDKGPGWE

SEQ ID NO: 32889 - protein, 97 aa, Homo sapiens
  MAP TO AL049840.4; EXPRESSED IN HELA, SIGNAL = 0.98; EXPRESSED IN BONE MARROW, SIGNAL = 0.81
CMVSPFYLRVQPLHRRCRFFTGHCPRAHHSLSHLQKVLRKSLSRMAPPPPQMAAPWRACHGHSAPPSSRPSCIRHCATRVMQTWRPSAGSWPTRPGP

SEQ ID NO: 32890 - protein, 220 aa, Homo sapiens
  MAP TO AC010395.3; EXPRESSED IN BONE MARROW, SIGNAL =   1; EXPRESSED IN HELA, SIGNAL = 1.2; SWISSPROT HIT: Q27969, EVALUE 1.00e-23
ACMPAQGCNSSCLVYVTFNQKIYVYWEVQLEWMESTNLLNDWRPSLSTIACCRSWAWILTTSLWLMPCFTKHSTIRPTTTVCSLKPPGSHLAVLASQLVKDSSEPLPYLLKLSLILAGWGIHITEVQDLTLGMKDGSSPRVTTSYTPHGLFGERRDKLTLCPFSYGPHPSHQQGHRTLALFQIIWDMSHSPLSLCRKQRLVCVAPIPIRKPGFRPRGAVE

SEQ ID NO: 32891 - protein, 38 aa, Homo sapiens
  MAP TO AC010395.3; EXPRESSED IN BONE MARROW, SIGNAL =   1; EXPRESSED IN HELA, SIGNAL = 1.2; SWISSPROT HIT: Q02817, EVALUE 8.50e+00
PVCLPRDATAPASYMSLSTRRSMCTGRCSWSGWSLPIC

SEQ ID NO: 32892 - protein, 162 aa, Homo sapiens
  MAP TO AL163853.3; EXPRESSED IN LUNG, SIGNAL = 1.4; EXPRESSED IN BONE MARROW, SIGNAL = 1.4; EXPRESSED IN FETAL LIVER, SIGNAL = 1.3; EXPRESSED IN BRAIN, SIGNAL = 1.3
LLVMFIMSAGTAIASYFIPSTVGVVLFMTGFGFLLSLNLSDMGHKIGTKSKDLPSGPEKHFSWKECLFYIIILVLALLETSLLHHFAGFSQISKSNSQAIVGYGLMILLIILWILREIQSIYIIGIFRNPFYPKDVQTVTVFFEKQTRLMKIGIVRRILLTL

SEQ ID NO: 32893 - protein, 271 aa, Homo sapiens
  MAP TO AC005332.1; EXPRESSED IN BRAIN, SIGNAL = 1.1; EXPRESSED IN HELA, SIGNAL = 0.6; EXPRESSED IN BONE MARROW, SIGNAL =   1; EXPRESSED IN LUNG, SIGNAL = 1.1; SWISSPROT HIT: O15403, EVALUE 0.00e+00
IMALKERIGWRYSLLFVGLLQLNIVIFGALLRPIFIRGPASPKIVIQENRKEAQYMLENEKTRTSIDSIDSGVELTTSPKNVPTHTNLELEPKADMQQVLVKTSPRPSEKKAPLLDFSILKEKSFICYALFGLFATLGFFAPSLYIIPLGISLGIDQDRAAFLLSTMAIAEVFGRIGAGFVLNREPIRKIYIELICVILLTVSLFAFTFATEFWGLMSCSIFFGFMVGTIGGTHIPLLAEDDVVGIEKMSSAAGVYIFIQSIAGLAGPPLA

SEQ ID NO: 32894 - protein, 222 aa, Homo sapiens
  MAP TO AF051976.2; EXPRESSED IN HELA, SIGNAL = 1.1; EXPRESSED IN BRAIN, SIGNAL = 1.6; EXPRESSED IN HEART, SIGNAL = 1.4; EXPRESSED IN BONE MARROW, SIGNAL = 1.3; SWISSPROT HIT: P48634, EVALUE 1.80e+00
RRAPPARATARAQDPLPLERAPVSARAPAAPKLRAPARAAALPGALGPAPAGLALRLPPPPPAALGRPSARATGAAGQRVGLRGAPCREPGGAPRPTSLPRAPTLVQGLPPERGGFRLPRGLSTGVAEASLVTAGLAPALAEELAGPRLLLTLGAPVASAVLAHGPLPAALPAPGPPAPLAAGVPSPTPSRWAPGPTRLAAAGLTQAALAAPGALPQPAAQL

SEQ ID NO: 32895 - protein, 525 aa, Homo sapiens
  MAP TO Z98304.1; EXPRESSED IN PLACENTA, SIGNAL = 2.6; EXPRESSED IN BRAIN, SIGNAL = 2.3; EXPRESSED IN HELA, SIGNAL = 2.3; EXPRESSED IN LUNG, SIGNAL = 2.4; EXPRESSED IN HEART, SIGNAL = 2.6; EXPRESSED IN BONE MARROW, SIGNAL = 2.6; EXPRESSED IN FETAL LIVER, SIGNAL = 2.3; SWISSPROT HIT: P51523, EVALUE 0.00e+00
RVKGLESSQQIISGELLFQREILERAPKDNSLYSVLKIWHIDNQMDRYQGNQDRVLRQVTVISRETLTDEMGSKYSAFGKMFNRCTDLAPLSQKFHKFDSCENSLKSNSDLLNYNRSYARKNPTKRFRCGRPPKYNASCSVPEKEGFIHTGMEPYGDSQCEKVLSHKQAHVQYKKFQAREKPNVCSMCGKAFIKKSQLIIHQRIHTGEKPYVCGDCRKAFSEKSHLIVHQRIHTGEKPYECTKYGRAFSRKSPFTVHQRVHTGEKPYECFECPKAFSQKSHLIIHQRVHTREKPFECSECRKAFCEMSHLFIHQITHTGKKPYECTECGKTFPRKTQLIIHQRTHTGEKPYKCGECGKTFCQQSHLIGHQRIHTGEKPYVCTDCGKAFSQKSHLTGHQRLHTGEKPYMCTECGKSFSQKSPLIIHQRIHTGEKPYQCGECGKTFSQKSLLIIHLRVHTGEKPYECTECGRAFSLKSHLILHQRGHTGEKPYECSECGKAFCGKSPLIIHQKTHPREKTPECAESG

SEQ ID NO: 32896 - protein, 412 aa, Homo sapiens
  MAP TO AC012331.9; EXPRESSED IN BONE MARROW, SIGNAL = 2.7; EXPRESSED IN LUNG, SIGNAL = 1.4; EXPRESSED IN HELA, SIGNAL = 0.57; EXPRESSED IN BRAIN, SIGNAL = 1.6; EXPRESSED IN HEART, SIGNAL = 1.4; SWISSPROT HIT: Q9Y2N3, EVALUE 6.00e-27
MDSLWGPGAGSHPFGVHNTRLSPDLCPGKIVLRALKESGAGMPEQDKDPRVQENPGDQRRVPEVTGDAPSAFRPLRDNGGLSPFVPGPGPLQTDLHAQRSEIRYNQTSQTSWTSSCTNRNAISSSYSSTGGLPGLKRRRGPASSHCQLTLSSSKTVSEDRPQAVSSGHTQCEKAADIAPGQTLTLRNDSSTSEASRPSTHKFPLLPCRRGEPLMLPPPLELGYRVTVEDLDREKEAAFQRINSALQVEDKAISDCRPSRPSHTLSSLATGASGLPAVSKAPSMDAQQETHKSQDCLGLLAPLASAAEVPSTAPMSGKKHRPPGPLFSSSDPLPATSSHSQDSAQVTSLIPAPFPAASMDAGMRRTRRGTSAPAAAAAAPPPSALNPTLGSLLEWMEALHISGPQPQLQQVPR

SEQ ID NO: 32897 - protein, 42 aa, Homo sapiens
  MAP TO AC012331.9; EXPRESSED IN BONE MARROW, SIGNAL = 2.7; EXPRESSED IN LUNG, SIGNAL = 1.4; EXPRESSED IN HELA, SIGNAL = 0.57; EXPRESSED IN BRAIN, SIGNAL = 1.6; EXPRESSED IN HEART, SIGNAL = 1.4; SWISSPROT HIT: P04579, EVALUE 1.70e+00
GLSVGPRSRESPLWGPQHPAVPRLVSREDSVEGPQGERGRDA

SEQ ID NO: 32898 - protein, 96 aa, Homo sapiens
  MAP TO AC010680.3; EXPRESSED IN BRAIN, SIGNAL = 0.8; EXPRESSED IN HELA, SIGNAL = 1.3; EXPRESSED IN BONE MARROW, SIGNAL = 0.96; SWISSPROT HIT: P52179, EVALUE 3.00e-14
TPGPPVNVTVKEISKDSAYVTWEPPIIDGGSPIINYVVQKRDAERKSWSTVTTECSKTSFRVANLEEGKSYFFRVFAENEYGIGDPGETRDAVKAS

SEQ ID NO: 32899 - protein, 95 aa, Homo sapiens
  MAP TO AC010680.3; EXPRESSED IN BRAIN, SIGNAL = 0.8; EXPRESSED IN HELA, SIGNAL = 1.3; EXPRESSED IN BONE MARROW, SIGNAL = 0.96; SWISSPROT HIT: P52179, EVALUE 4.00e-10
TPGPVVDLKVRSVSKSSCSIGWKKPHSDGGSRIIGYVVDFLTEENKWQRVMKSLSLQYSAKDLTEGKEYTFRVSAENENGEGTPSEITVVARDDV

SEQ ID NO: 32900 - protein, 85 aa, Homo sapiens
  MAP TO AF023268.1; EXPRESSED IN LUNG, SIGNAL = 1.3; EXPRESSED IN HEART, SIGNAL = 1.4; EXPRESSED IN FETAL LIVER, SIGNAL = 1.5; EXPRESSED IN HELA, SIGNAL = 0.58; EXPRESSED IN BONE MARROW, SIGNAL = 1.2; SWISSPROT HIT: P49746, EVALUE 8.00e-36
LVRYQREDGKVHAVNLQQAGLADGRTHTVLLRLRGPSRPSPALHLYVDCKLGDQHAGLPALAPIPPAEVDGLEIRTGQKAYLRMQ

SEQ ID NO: 32901 - protein, 34 aa, Homo sapiens
  MAP TO AF023268.1; EXPRESSED IN LUNG, SIGNAL = 1.3; EXPRESSED IN HEART, SIGNAL = 1.4; EXPRESSED IN FETAL LIVER, SIGNAL = 1.5; EXPRESSED IN HELA, SIGNAL = 0.58; EXPRESSED IN BONE MARROW, SIGNAL = 1.2; SWISSPROT HIT: P49746, EVALUE 4.00e-13
GFVESMKIILGGSMARVGALSECPFQGDESIHSA

SEQ ID NO: 32902 - protein, 205 aa, Homo sapiens
  MAP TO AC025436.2; EXPRESSED IN BRAIN, SIGNAL = 1.1; EXPRESSED IN HELA, SIGNAL = 1.8; EXPRESSED IN LUNG, SIGNAL =   1; EXPRESSED IN BONE MARROW, SIGNAL = 1.1; SWISSPROT HIT: Q9Y5E9, EVALUE 1.00e-68
VAGLRGPAGVRVPRGRLRPRFSGFEQRGAGARAGVLDANDNSPFVLYPLQNGSAPCTELVPRAAEPGYLVTKVVAVDGDSGQNAWLSYQLLKATEPGLFGVWAHNGEVRTARLLSERDAAKHRLVVLVKDNGEPPRSATATLHVLLVDGFSQPYLPLPEAAPAQAQADSLTVYLVVALASVSSLFLFSVLLFVAVRLCRRSRAAS

SEQ ID NO: 32903 - protein, 516 aa, Homo sapiens
  MAP TO AC025436.2; EXPRESSED IN BRAIN, SIGNAL = 1.1; EXPRESSED IN HELA, SIGNAL = 1.8; EXPRESSED IN LUNG, SIGNAL =   1; EXPRESSED IN BONE MARROW, SIGNAL = 1.1; SWISSPROT HIT: Q9Y5E4, EVALUE 0.00e+00
METPLPKAPEKRQVTAIIFLLLLWEAGSATIKYSVLEERDSGSFVANLAKDLGLGVGELAARGARILSKGNKQYLQLERKSGNLLLKEKLDREELCGDIDPCILHFQMLLKNPVQFIQGELQLQDVNDHAPEFLENEILLKISEGSHPGTSFPLKIAQDLDVGSNTVQNYSISTNSYFHLFTRNHSDGKKYPELVLDQALDLEEQPQLRLTLTALDGGSPPRTGTSQVLIVIVDINDNVPEFAQRRYEVQVPENTPIGSLVITVSARDLDAGTHGELSYSFFQYSNQIIQAFEINSITGEIRFKKALDFEEIQSYHMEVEASDGGGLSGKCTVAIEVMDINDNAPELTMSLLISDILENSPETVVAVFGISDPDSGNNGKMMCSIQDHLPFLLKPTLENFYTLLTEGALDRESRAEYNITITVTDLGTPRLKTEYNITLRVSDVNDNAPAFTQTSYTLFVRENNSPALHIGSVSATDRDSGTNAQVTYSLLPPQNPHLPLASLVSINTDNGHLFAL

SEQ ID NO: 32904 - protein, 51 aa, Homo sapiens
  MAP TO AC025436.2; EXPRESSED IN BRAIN, SIGNAL = 1.1; EXPRESSED IN HELA, SIGNAL = 1.8; EXPRESSED IN LUNG, SIGNAL =   1; EXPRESSED IN BONE MARROW, SIGNAL = 1.1; SWISSPROT HIT: Q9Y5F2, EVALUE 1.50e-01
RGSPALSSEALVRVLVCWTPTTTRPSCCTRCRTAPRPAPSWCPGRPSRATW

SEQ ID NO: 32905 - protein, 540 aa, Homo sapiens
  MAP TO AF238280.1; EXPRESSED IN BRAIN, SIGNAL = 1.1; EXPRESSED IN HELA, SIGNAL = 1.8; EXPRESSED IN LUNG, SIGNAL = 1.3; EXPRESSED IN BONE MARROW, SIGNAL = 1.5; EXPRESSED IN FETAL LIVER, SIGNAL = 1.2; SWISSPROT HIT: P52742, EVALUE 0.00e+00
CDTRTEDKEFLHKEDIHEDLESQAEISENYAGDVSQVPELGDLCDDVSERDWGVPEGRRLPQSLSQEGDFTPAAMGLLRGPLGEKDLDCNGFDSRFSLSPNLMACQEIPTEERPHPYDMGGQSFQHSVDLTGHEGVPTAESPLICNECGKTFQGNPDLIQRQIVHTGEASFMCDDCGKTFSQNSVLKNRHRSHMSEKAYQCSECGKAFRGHSDFSRHQSHHSSERPYMCNECGKAFSQNSSLKKHQKSHMSEKPYECNECGKAFRRSSNLIQHQRIHSGEKPYVCSECGKAFRRSSNLIKHHRTHTGEKPFECGECGKAFSQSAHLRKHQRVHTGEKPYECNDCGKPFSRVSNLIKHHRVHTGEKPYKCSDCGKAFSQSSSLIQHRRIHTGEKPHVCNVCGKAFSYSSVLRKHQIIHTGEKPYRCSVCGKAFSHSSALIQHQGVHTGDKPYACHECGKTFGRSSNLILHQRVHTGEKPYECTECGKTFSQSSTLIQHQRIHNGLKPHECNQCGKAFNRSSNLIHHQKVHTGEKPYTCVEC

SEQ ID NO: 32906 - protein, 94 aa, Homo sapiens
  MAP TO AF238280.1; EXPRESSED IN BRAIN, SIGNAL = 1.1; EXPRESSED IN HELA, SIGNAL = 1.8; EXPRESSED IN LUNG, SIGNAL = 1.3; EXPRESSED IN BONE MARROW, SIGNAL = 1.5; EXPRESSED IN FETAL LIVER, SIGNAL = 1.2; SWISSPROT HIT: P49638, EVALUE 7.60e+00
TAFQVIFYLLFQIVTPGLKTRSFFTRKTFMKIWNHRQKYQKTMLVMFPRYPSLEICVMMYQKETGESPKAGGCHSPSPRRGTSHQLPWGSLGAP

SEQ ID NO: 32907 - protein, 601 aa, Homo sapiens
  MAP TO AC004017.1; EXPRESSED IN HELA, SIGNAL = 0.4; EXPRESSED IN BONE MARROW, SIGNAL = 0.76; SWISSPROT HIT: P52740, EVALUE 0.00e+00
YCHGMENEAIASEQSVSIQVRTSKGNTPTQKTHLSEIKMCVPVLKDILPAAEHQTTSPVQKSYLGSTSMRGFCFSADLHQHQKHYNEEEPWKRKVDEATFVTGCRFHVLNYFTCGEAFPAPTDLLQHEATPSGEEPHSSSSKHIQAFFNAKSYYKWGEYRKASSHKHTLVQHQSVCSEGGLYECSKCEKAFTCKNTLVQHQQIHTGQKMFECSECEESFSKKCHLILHKIIHTGERPYECSDREKAFIHKSEFIHHQRRHTGGVRHECGECRKTFSYKSNLIEHQRVHTGERPYECGECGKSFRQSSSLFRHQRVHSGERPYQCCECGKSFRQIFNLIRHRRVHTGEMPYQCSDCGKSFSCKSELIQHQRIHSGERPYECRECGKSFRQFSNLIRHRSIHTGDRPYECSECEKSFSRKFILIQHQRVHTGERPYECSECGKSFTRKSDLIQHRRIHTGTRPYECSECGKSFRQRSGLIQHRRLHTGERPYECSECGKSFSQSASLIQHQRVHTGERPYECSECGKSFSQSSSLIQHQRGHTGERPYECSQCGKPFTHKSDLIQHQRVHTGERPYECSECGKSFSRKSNLIRHRRVHTEERP

SEQ ID NO: 32908 - protein, 20 aa, Homo sapiens
  MAP TO AC004017.1; EXPRESSED IN HELA, SIGNAL = 0.4; EXPRESSED IN BONE MARROW, SIGNAL = 0.76
CISSAFLCFQVIAMEWRMRR

SEQ ID NO: 32909 - protein, 38 aa, Homo sapiens; identical to SEQ ID NO: 31952
  MAP TO Z97184.1; EXPRESSED IN HELA, SIGNAL = 2.2; EXPRESSED IN BONE MARROW, SIGNAL =   1

SEQ ID NO: 32910 - protein, 657 aa, Homo sapiens
  MAP TO Z97184.1; EXPRESSED IN HELA, SIGNAL = 2.2; EXPRESSED IN BONE MARROW, SIGNAL =   1; SWISSPROT HIT: P18730, EVALUE 9.00e-15
RPPRPPSSFLCSCGWGGIPSLHNMEPSPLSPSGAALPLPLSLAPPPLPLPAAAVVHVSFPEVTSALLESLNQQRLQGQLCDVSIRVQGREFRAHRAVLAASSPYFHDQVLLKGMTSISLPSVMDPGAFETVLASAYTGRLSMAAADIVNFLTVGSVLQMWHIVDKCTELLREGRASATTTITTAAATSVTVPGAGVPSGSGGTVAPATMGSARSHASSRASENQSPSSSNYFSPRESTDFSSSSQEAFAASAVGSGERRGGGPVFPAPVVGSGGATSGKLLLEADELCDDGGDGRGAVVPGAGLRRPTYTPPSIMPQKHWVYVKRGGNCPAPTPLVPQDPDLEEEEEEEDLVLTCEDDEDEELGGSSRVPVGGGPEATLSISDVRTLSEPPDKGEEQVNFCESSNDFGPYEGGGPVAGLDDSGGPTPSSYAPSHPPRPLLPLDMQGNQILVFPSSSSSSSSQAPGQPPGNQAEHGAVTVGGTSVGSLGVPGSVGGVPGGTGSGDGNKIFLCHCGKAFSHKSMRDRHVNMHLNLRPFDCPVCNKKFKMKHHLTEHMKTHTGLKPYECGVCAKKFMWRDSFMRHRGHCERRHRLGGVGAVPGPGTPTGPSLPSKRESPGVGGGSGDEASAATPPSSRRVWSPPRVHKVEMGFGGGGGAN

SEQ ID NO: 32911 - protein, 406 aa, Homo sapiens [sequence omitted]

SEQ ID NO: 32912 - protein, 514 aa, Homo sapiens
  MAP TO AC009144.4; EXPRESSED IN BONE MARROW, SIGNAL = 1.7; EXPRESSED IN HEART, SIGNAL = 1.8; EXPRESSED IN FETAL LIVER, SIGNAL = 2.1; EXPRESSED IN LUNG, SIGNAL = 1.5; EXPRESSED IN PLACENTA, SIGNAL = 2.5; EXPRESSED IN HELA, SIGNAL = 0.78; EXPRESSED IN BRAIN, SIGNAL = 1.7; SWISSPROT HIT: Q57368, EVALUE 2.00e-07
MAARRSLSARGRGILQAAAGRLLPLLLLSCCCGAGGCAAVGENEETVIIGLRLEDTNDVSFMEGGALRVSERTRVKLRVYGQNINNETWSRIAFTEHERRRHSPGERGLGGPAPPEPDSGPQRCGIRTSDIIILPHIILNRRTSGIIEIEIKPLRKMEKSKSYYLCTSLSTPALGAGGSGSTGGAVGGKGGSGVAGLPPPPWAETTWIYHDGEDTKMIVGEEKKFLLPFWLQVIFISLLLCLSGMFSGLNLGLMALDPMELRIVQNCGTEKEKNYAKRIEPVRRQGNYLLCSLLLGNVLVNTTLTILLDDIAGSGLVAVVVSTIGIVIFGEIVPQAICSRHGLAVGANTIFLTKFFMMMTFPASYPVSKLLDCVLGQEIGTVYNREKLLEMLRVTDPYNDLVKEELNIIQGALELRTKTVEDVMTPLRDCFMITGEAILDFNTMSEIMESGYTRIPVFEGERSNIVDLLFVKDLAFVDPDDCTPLKTITKFYNHPLHFVFNDTKLDAMLEEFKK

SEQ ID NO: 32913 - protein, 27 aa, Homo sapiens
  MAP TO AC009144.4; EXPRESSED IN BONE MARROW, SIGNAL = 1.7; EXPRESSED IN HEART, SIGNAL = 1.8; EXPRESSED IN FETAL LIVER, SIGNAL = 2.1; EXPRESSED IN LUNG, SIGNAL = 1.5; EXPRESSED IN PLACENTA, SIGNAL = 2.5; EXPRESSED IN HELA, SIGNAL = 0.78; EXPRESSED IN BRAIN, SIGNAL = 1.7
WRRAAASALAAGGSCRRLRGGCCRCSC

SEQ ID NO: 32914 - protein, 160 aa, Homo sapiens
  MAP TO AL035079.14; EXPRESSED IN HELA, SIGNAL = 1.4; EXPRESSED IN BONE MARROW, SIGNAL = 0.85; EXPRESSED IN FETAL LIVER, SIGNAL = 0.92; SWISSPROT HIT: P04912, EVALUE 2.00e-02
ALIRVAREAQRLSVLHAKCTRFEVQSAVRLVHSWALAESCALAAVKALSLYSMSAGDGLRRGKSARCGLTFSVGRFFRWMVDTRISVRIHEYAAISLTACMENLVEEIRARVMASHSPDGGGAGGGEVSAEALEMVINNDAELWGVLQPYEHLICGKNAN

SEQ ID NO: 32915 - protein, 99 aa, Homo sapiens
  MAP TO AL035079.14; EXPRESSED IN HELA, SIGNAL = 1.4; EXPRESSED IN BONE MARROW, SIGNAL = 0.85; EXPRESSED IN FETAL LIVER, SIGNAL = 0.92
LRLHEQPPQQLGHGEHGAARGPRSGRPLLALSAAPRAGGVPLDRRRRGPGAPQRRWRPAAAPVLRRGGEAPGRAAPQGTDPRGPRGAAPERAARQVHPL

SEQ ID NO: 32916 - protein, 353 aa, Homo sapiens
  MAP TO AL009173.1; EXPRESSED IN PLACENTA, SIGNAL = 3.3; EXPRESSED IN BRAIN, SIGNAL = 7.2; EXPRESSED IN HELA, SIGNAL = 1.3; EXPRESSED IN LUNG, SIGNAL = 1.9; EXPRESSED IN HEART, SIGNAL = 2.3; EXPRESSED IN BONE MARROW, SIGNAL = 2.2; SWISSPROT HIT: Q99457, EVALUE 1.00e-122
MAEADFKMVSEPVAHGVAEEEMASSTSDSGEESDSSSSSSSTSDSSSSSSTSGSSSGSGSSSSSSGSTSSRSRLYRKKRVPEPSRRARRAPLGTNFVDRLPQAVRNRVQALRNIQDECDKVDTLFLKAIHDLERKYAELNKPLYDRRFQIINAEYEPTEEECEWNSEDEEFSSDEEVQDNTPSEMPPLEGEEEENPKENPEVKAEEKEVPKEIPEVKDEEKEVPKEIPEVKAEEKADSKDCMEATPEVKEDPKEVPQVKADDKEQPKATEAKARAAVRETHKRVPEERLQDSVDLKRARKGKPKREDPKGIPDYWLIVLKNVDKLGPMIQKYDEPILKFLSDVSLKFSKPGQP

SEQ ID NO: 32917 - protein, 172 aa, Homo sapiens
  MAP TO AC011497.3; EXPRESSED IN BONE MARROW, SIGNAL = 1.2; EXPRESSED IN LUNG, SIGNAL = 0.97; EXPRESSED IN BRAIN, SIGNAL = 1.4; EXPRESSED IN HELA, SIGNAL = 0.93; SWISSPROT HIT: Q05469, EVALUE 7.00e-89
MDLRTMTQSLVTLAEDNIAFFSSQGPGETAQRLSGVFAGVREQALGLEPALGRLLGVAHLFDLDPETPANGYRSLVHTARCCLAHLLHKSRYVASNRRSIFFRTSHNLAELEAYLAALTQLRALVYYAQRLLVTNRPGVLFFEGDEGLTADFLREYVTLHKGCFYGRCLGFQ

SEQ ID NO: 32918 - protein, 793 aa, Homo sapiens
  MAP TO AL035669.27; EXPRESSED IN BRAIN, SIGNAL = 0.82; EXPRESSED IN BONE MARROW, SIGNAL = 1.1; EXPRESSED IN FETAL LIVER, SIGNAL = 1.1; SWISSPROT HIT: P04280, EVALUE 3.00e-11
MCADVRRNSVERPAEPVAGAATPSLVEQQKMLEELNKQIEEQKRQLEEQEEALRQQRAAVGVSMAHFSVSDALMSPPPKSSLPKAELFQQEQQSADKPASLPPASQASNHRDPRQARRLATETGEGEGEPLSRLSARGAQGALPERDASRGGLVGQAPMPVPEEKEPASSPWASGEKPPAGSEQDGWKAEPGEGTRPATVGDSSARPARRVLLPTPPCGALQPGFPLQHDGERDPFTCPGFASQDKALGSAQYEDPRNLHSAGRSSSPAGETEGDREPQARPGEGTAPLPPPGQKVGGSQPPFQGQREPGPHALGMSGLHGPNFPGPRGPAPPFPEENIASNDGPRGPPPARFGAQKGPIPSLFSGQHGPPPYGDSRGPSPSYLGGPRGVAPSQFEERKDPHGEKREFQDAPYNEVTGAPAQFEGTEQAPFLGSRGGAPFQFGGQRRPLLSQLKGPRGGPPPSQFGGQRGPPPGHFVGPRGPHPSQFETARGPHPNQFEGPRGQAPNFMPGPRGIQPQQFEDQRVHSPPRFTNQRAPAPLQFGGLRGSAPFSEKNEQTPSRFHFQGQAPQVMKPGPRPLLELPSHPPQHRKDRWEEAGPPSALSSSAPGQGPEADGQWASADFREGKGHEYRNQTFEGRQRERFDVGPKEKPLEEPDAQGRASEDRRRERERGRNWSRERDWDRPREWDRHRDKDSSRDWDRNRERSANRDREREADRGKEWDRSRERSRNRERERDRRRDRDRSRSRERDRDKARDRERGRDRKDRSKSKESARDPKPEASRASDAGTASQA

SEQ ID NO: 32919 - protein, 253 aa, Homo sapiens
  MAP TO AL035462.12; EXPRESSED IN BRAIN, SIGNAL = 0.91; EXPRESSED IN HELA, SIGNAL = 1.7; EXPRESSED IN LUNG, SIGNAL = 1.1; EXPRESSED IN BONE MARROW, SIGNAL = 0.86; EXPRESSED IN FETAL LIVER, SIGNAL = 0.96
MRHGYGVRQSVPYGMAVVVRSPLRTSLSSLRSEHSNGTVAPDSPASPASDGPALPSPAIPRGGFALSLLANAEAAARAPKGGGLFQRGALLGKLRRAESRTSVGSQRSRVSFLKSDLSSGASDAASTASLGEAAEGADEAAPFEADIDATTTETYMGEWKNDKRSGFGVSERSSGLRYEGEWLDNLRHGYGCTTLPDGHREEGKYRHNVLVKDTKRRMLQLKSNKVRQKVEHSVEGAQRAAAIARQKAEIAAS

SEQ ID NO: 32920 - protein, 353 aa, Homo sapiens
  MAP TO AC010645.5; EXPRESSED IN HELA, SIGNAL = 0.78; EXPRESSED IN BRAIN, SIGNAL = 0.9; EXPRESSED IN BONE MARROW, SIGNAL = 1.1; SWISSPROT HIT: Q9Y2P7, EVALUE 1.00e-74
CWCGVEDEAAPSKQSIYIQRETQVRTPMAGVSPKKAHPCEMCGPILGDILHVADHQGTHHKQKLHRCEAWGNKLYDSGNFHQHQNEHIGEKPYRGSVEEALFAKRCKLHVSGESSVFSESGKDFLLRSGLLQQEATHTGKSNSKTECVSLFHGGKSHYSCGGCMKHFSTKDILSQHERLLPTEEPSVWCECGKSSSKYDSFSNHQGVHTREKPYTCGICGKLFNSKSHLLVHQRIHTGEKPYECEVCQKFFRHKYHLIAHQRVHTGERPYECSDCGKSFTHSSTFRVHKRVHTGQKPYECSECGKSFAESSSLTKHRRVHTGEKPYGCSECEKKFRQISSLRHHQRVHKRKGL

SEQ ID NO: 32921 - protein, 165 aa, Homo sapiens
  MAP TO AC002381.1; EXPRESSED IN BRAIN, SIGNAL = 2.1; EXPRESSED IN LUNG, SIGNAL = 2.1; EXPRESSED IN BONE MARROW, SIGNAL =   2; EXPRESSED IN FETAL LIVER, SIGNAL = 2.4; SWISSPROT HIT: Q99680, EVALUE 5.00e-84
KKTNCSKRMCFSPILEINMQSESNITVRDDIDDINTNMYQPLSYPLSFQVSLTGFLMLEIVLGLGSNLTVLVLYCMKSNLINSVSNIITMNLHVLDVIICVGCIPLTIVILLLSLESNTALICCFHEACVSFASVSTAINVFAITLDRYDISVKPANRILTMGRA

SEQ ID NO: 32922 - protein, 795 aa, Homo sapiens
  MAP TO AC025436.2; EXPRESSED IN BRAIN, SIGNAL = 1.2; EXPRESSED IN HELA, SIGNAL = 1.8; EXPRESSED IN LUNG, SIGNAL = 1.2; EXPRESSED IN HEART, SIGNAL = 1.3; EXPRESSED IN BONE MARROW, SIGNAL = 1.4; EXPRESSED IN FETAL LIVER, SIGNAL = 1.4; SWISSPROT HIT: Q9Y5E4, EVALUE 0.00e+00
METALAKTPQKRQVMFLAILLLLWEAGSEAVRYSIPEETESGYSVANLAKDLGLGVGELATRGARMHYKGNKELLQLDIKTGNLLLYEKLDREVMCGATEPCILHFQLLLENPVQFFQTDLQLTDINDHAPEFPEKEMLLKIPESTQPGTVFPLKIAQDFDIGSNTVQNYTISPNSHFHVATHNRGDGRKYPELVLDKALDREERPELSLTLTALDGGAPPRSGTTTIRIVVLDNNDNAPEFLQSFYEVQVPENSPLNSLVVVVSARDLDAGAYGSVAYALFQGDEVTQPFVIDEKTAEIRLKRALDFEATPYYNVEIVATDGGGLSGKCTVAIEVVDVNDNAPELTMSTLSSPTPENAPETVVAVFSVSDPDSGDNGRMICSIQNDLPFLLKPTLKNFYTLVTQRTLDRESQAEYNITITVTDMGTPRLKTEHNITVLVSDVNDNAPAFTQTSYTLFVRENNSPALHIGSVSATDRDSGTNAQVTYSLLPPQNPHLRLASLVSINADNGHLFALRSLDYEALQAFEFRVGATDRGSPALSSEALVRVLVLDANDNSPFVLYPLQNGSAPCTELVPRAAEPGYLVTKVVAVDGDSGQNAWLSYQLLKATEPGLFSMWAHNGEVRTARLLSERDAAKHRLVVLVKDNGEPPRSATATLHVLLVDGFSQPYLPLPEAAPAQAQADSLTVYLVVALASVSSLFLFSVLLFVAVRLCRRSRAAPVGRCSVPEGPFPGHLVDVSGTGTLSQSYHYEVCLTGDSGAGEFKFLKPIIPNLLPQGAGEEIGKTAAFRNSFGLN

SEQ ID NO: 32923 - protein, 243 aa, Homo sapiens
  MAP TO AL049542.5; EXPRESSED IN HEART, SIGNAL = 1.8; EXPRESSED IN LUNG, SIGNAL = 1.9; EXPRESSED IN BONE MARROW, SIGNAL = 2.1; EXPRESSED IN FETAL LIVER, SIGNAL = 1.3; EXPRESSED IN HELA, SIGNAL =   2; SWISSPROT HIT: P27398, EVALUE 3.00e-06
NNPVPRSRREVPPQLQPPVPEAAQPSPSAGCRGAPQGSGWAGASRLAELLSGKRLSVLEEEATEGGTSRVEAGSSTSGSDIIDLAGDTVRYTPASPSSPDFTTWSCAKCTLRNPTVAPRCSACGCSKLHGFQEHGEPPTHCPDCGADKPSPCGRSCGRVSSAQKAARVLPERPGQWACPACTLLNALRAKHCAACHTPQLLVAQRRGAAPLRRRESMHVEQRRQTDEGEAKALWENIVAFCRE

SEQ ID NO: 32924 - protein, 45 aa, Homo sapiens
  MAP TO AL049542.5; EXPRESSED IN HEART, SIGNAL = 1.8; EXPRESSED IN LUNG, SIGNAL = 1.9; EXPRESSED IN BONE MARROW, SIGNAL = 2.1; EXPRESSED IN FETAL LIVER, SIGNAL = 1.3; EXPRESSED IN HELA, SIGNAL =   2
TTPCRAADARFPPSCSHRCLRLPSRHPLPAAGEPPRARAGLGPPA

SEQ ID NO: 32925 - protein, 225 aa, Homo sapiens
  MAP TO Z99757.11; EXPRESSED IN BRAIN, SIGNAL = 1.2; EXPRESSED IN HEART, SIGNAL = 1.5; EXPRESSED IN LUNG, SIGNAL = 1.1; EXPRESSED IN BONE MARROW, SIGNAL = 1.2; EXPRESSED IN HELA, SIGNAL = 0.85; SWISSPROT HIT: P57073, EVALUE 4.00e-77
QTHGPPTPPTTPKTELQQAGAKPELKLEGRRPVDSGRQNIDFSNVDISELSSEVMGTMDAFDVHEFDQYLPLGGPAPPEPGQAYGGAYFHAGASPVWAHKSAPSASASPTETGPPRPHIKTEQPSPGHYGDQPRGSPDYGSCSGQSSATPAAPAGPFAGSQGDYGDLQASSYYGAYPGYAPGLYQYPCFHSPRRPYASPLLNGLALPPAHSPTSHWDQPVYTTLT

SEQ ID NO: 32926 - protein, 369 aa, Homo sapiens
  MAP TO AL139187.4; EXPRESSED IN LUNG, SIGNAL = 1.3; EXPRESSED IN BRAIN, SIGNAL = 0.91; EXPRESSED IN BONE MARROW, SIGNAL = 0.77; SWISSPROT HIT: P32293, EVALUE 3.10e+00
GDDSDEEDLCISNKWTFQRTSRRWSRVDDLYTLLPRGDRNGSPGGTGMRNTTSSESVLTDLSEPEVCSIHSESSGGSDSRSQPGQCCTDNPVMLDAPLVSSSLPQPPRDVLNHPFHPKNEKPTRARAKSFLKRMETLRGKGAHGRHKGSGRTGGLVISGPMLQQEPESFKAMQCIQIPNGDLQNSPPPACRKGLPCSGKSSGESSPSEHSSSGVSTPCLKERKCHEANKRGGMYLEDLDVLAGTALPDAGDQSRMHEFHSQENLVVHIPKDHKPGTFPKALSIESLSPTDSSNGVNWRTGSISLGREQVPGAREPRLMASCHRASRVSIYDNVPGSHLYASTGDLLDLEKDDLFPHLDDILQHVNGLQE

SEQ ID NO: 32927 - protein, 367 aa, Homo sapiens
  MAP TO AC010205.5; EXPRESSED IN HELA, SIGNAL = 1.7; EXPRESSED IN BRAIN, SIGNAL = 1.5; EXPRESSED IN BONE MARROW, SIGNAL = 1.4; EXPRESSED IN FETAL LIVER, SIGNAL = 1.1; EXPRESSED IN LUNG, SIGNAL = 1.9; SWISSPROT HIT: P36166, EVALUE 3.60e-01
HFHELYKVILLPNQTHYIIPKGECLPYFSFAEVAKRGVEGAYSDNPIIRHASIANKWKTIHLIMHSGMNATTIHFNLTFQNTNDEEFKMQITVEVDTREGPKLNSTAQKGYENLVSPITLLPEAEILFEDIPKEKRFPKFKRHDVNSTRRAQEEVKIPLVNISLLPKDAQLSLNTLDLQLEHGDITLKGYNLSKSALLRSFLMNSQHAKIKNQAIITDETNDSLVAPQEKQVHKSILPNSLGVSERLQRLTFPAVSVKVNGHDQGQNPPLDLETTARFRVETHTQKTIGGNVTKEKPPSLIVPLESQMTKEKKITGKEKENSRMEENAENHIGVTEVLLGRKLQHYTDSYLGFLPWEKKKYFQDLLD

SEQ ID NO: 32928 - protein, 212 aa, Homo sapiens
  MAP TO Z98883.3; EXPRESSED IN HEART, SIGNAL = 1.3; EXPRESSED IN BONE MARROW, SIGNAL = 1.4; EXPRESSED IN BRAIN, SIGNAL = 1.1; EXPRESSED IN HELA, SIGNAL = 0.36; SWISSPROT HIT: P53607, EVALUE 9.80e-01
MAASVDRHVRENAHPWVFATVSVDSARFCSLVASVSVDSARFCYLVALISVDSARFCSLVASVSVDSQGFVPSWHQSAWIRKVLFPRGISQRGFARFCSLVASVSVDSQGFVPSWHQSAWIRKVLFPRGISQRGFARFCSLVASVSVDSQGFVPSWHQSAWIRKVLFPRGISQRGFARFCSLVASVSVDLQSFVPLWHHTPFLFGLGLPWPP

SEQ ID NO: 32929 - protein, 293 aa, Homo sapiens
  MAP TO AL049734.11; EXPRESSED IN FETAL LIVER, SIGNAL = 1.3; EXPRESSED IN BRAIN, SIGNAL = 1.2; EXPRESSED IN LUNG, SIGNAL = 1.2; EXPRESSED IN BONE MARROW, SIGNAL = 1.2; SWISSPROT HIT: Q9NQN1, EVALUE 1.00e-64
GISNYPQWRDTFFTLVLIIYLSTLLGNGFMIFLIHFDPNLHTPIYFFLSNLSFLDLCYGTASMPQALVHCFSTHPYLSYPRCLAQTSVSLALATAECLLLAAMAYDRVVAISNPLRYSVVMNGPVCVCLVATSWGTSLVLTAMLILSLRLHFCGANVINHFACEILSLIKLTCSDTSLNEFMILITSIFTLLLPFGFVLLSYIRIAMAIIRIRSLQGRLKAFTTCGSHLTVVTIFYGSAISMYMKTQSKSYPDQDKFISVFYGALTPMLNPLIYSLRKKDVKRAIRKVMLKRT

SEQ ID NO: 32930 - protein, 502 aa, Homo sapiens
  MAP TO AC012313.5; EXPRESSED IN LUNG, SIGNAL =   1; EXPRESSED IN BONE MARROW, SIGNAL = 1.1; EXPRESSED IN FETAL LIVER, SIGNAL = 1.4; EXPRESSED IN PLACENTA, SIGNAL = 1.9; EXPRESSED IN BRAIN, SIGNAL = 1.2; SWISSPROT HIT: P51523, EVALUE 0.00e+00
HRREMESPRGWTLQVAPEEGQVLCNVKTATRGLSEGAVSGGWGAWENSTEVPREAGDGQRQQATLGAADEQGGPGRELGPADGGRDGAGPRSEPADRALRPSPLPEEPGCRCGECGKAFSQGSYLLQHRRVHTGEKPYTCPECGKAFAWSSNLSQHQRIHSGEKPYACRECGKAFRAHSQLIHHQETHSGLKPFRCPDCGKSFGRSTTLVQHRRTHTGEKPYECPECGKAFSWNSNFLEHRRVHTGARPHACRDCGKAFSQSSNLAEHLKIHAGARPHACPDCGKAFVRVAGLRQHRRTHSSEKPFPCAECGKAFRESSQLLQHQRTHTGERPFECAECGQAFVMGSYLAEHRRVHTGEKPHACAQCGKAFSQRSNLLSHRRTHSGAKPFACADCGKAFRGSSGLAHHRLSHTGERPFACAECGKAFRGSSELRQHQRLHSGERPFVCAHCSKAFVRKSELLSHRRTHTGERPYACGECGKPFSHRCNLNEHQKRHGGRAAP

SEQ ID NO: 32931 - protein, 21 aa, Homo sapiens
  MAP TO AC012313.5; EXPRESSED IN LUNG, SIGNAL =   1; EXPRESSED IN BONE MARROW, SIGNAL = 1.1; EXPRESSED IN FETAL LIVER, SIGNAL = 1.4; EXPRESSED IN PLACENTA, SIGNAL = 1.9; EXPRESSED IN BRAIN, SIGNAL = 1.2
WSPQEGGPCRWPQRKARSSAM

SEQ ID NO: 32932 - protein, 85 aa, Homo sapiens
  MAP TO AC016572.4; EXPRESSED IN HELA, SIGNAL = 1.6; EXPRESSED IN BONE MARROW, SIGNAL = 1.1; EXPRESSED IN FETAL LIVER, SIGNAL = 0.93; SWISSPROT HIT: P76224, EVALUE 2.80e+00
LKITKESTLGRSPINVAIVRNPSTTALPLNSIKGFIPGKNPLGVMSVVKLSEIILALKYINESTLGNDLTNVKNVGKHTSLSRAL

SEQ ID NO: 32933 - protein, 403 aa, Homo sapiens
  MAP TO AC016572.4; EXPRESSED IN HELA, SIGNAL = 1.6; EXPRESSED IN BONE MARROW, SIGNAL = 1.1; EXPRESSED IN FETAL LIVER, SIGNAL = 0.93; SWISSPROT HIT: Q05481, EVALUE 0.00e+00
IHLGEKPYKCSYCEKSFNYSSALEQHKRIHTREKPFGCDECGKAFRNNSGLKVHKRIHTGERPYKCEECGKAYISLSSLINHKSVHPGEKPFKCDECEKAFITYRTLTNHKKVHLGEKPYKCDVCEKSFNYTSLLSQHRRVHTREKPYECDRCEKVFRNNSSLKVHKRIHTGERPYECDVCGKAYISHSSLINHKSTHPGKTPHTCDECGKAFFSSRTLISHKRVHLGEKPFKCVECGKSFSYSSLLSQHKRIHTGEKPYVCDRCGKAFRNSSGLTVHKRIHTGEKPYECDECGKAYISHSSLINHKSVHQGKQPYNCECGKSFNYRSVLDQHKRIHTGKKPYRCNECGKAFNIRSNLTKHKRTHTGEESLNVIYVGSYSGTSQKRTYEGGNALDGGRMRMPL

SEQ ID NO: 32934 - protein, 228 aa, Homo sapiens
  MAP TO AL132795.12; EXPRESSED IN HELA, SIGNAL =   2; EXPRESSED IN BRAIN, SIGNAL = 0.87; EXPRESSED IN HEART, SIGNAL = 1.2; EXPRESSED IN LUNG, SIGNAL =   1; EXPRESSED IN BONE MARROW, SIGNAL = 1.1; EXPRESSED IN FETAL LIVER, SIGNAL = 1.2; SWISSPROT HIT: P23255, EVALUE 1.30e+00
MEDSTSPKQEKENQEELGETRRPWEGKTAASPQYSEPESSEPLEAKQGPETGRQSRSSRPWSPQSRAKTPLGGPAGPETSSPAPVSPREPSSSPSPLAPARQDLAAPPQSDRTTSVIPEAGTPYPDPLEQSSDKRESTPHHTSQSEGNTFQQSQQPKPHLCGRRDVSYNNAKQKELRFDVFQEEDSNSDYDLQQPAPGGSEVAPSMLEITIQNAKAYLLKTSSNSGFN

SEQ ID NO: 32935 - protein, 202 aa, Homo sapiens
  MAP TO AL121963.10; EXPRESSED IN HELA, SIGNAL = 1.2; EXPRESSED IN BONE MARROW, SIGNAL = 0.83; SWISSPROT HIT: Q03692, EVALUE 2.00e-15
PGKPGLTGPPGNMGPQGPKGIPGSHGLPGPKGETGPAGPAGYPGAKGERGSPGSDGKPGYPGKPGLDGPKGNPGLPGPKGDPGVGGPPGLPGPVGPAGAKGMPGHNGEAGPRGAPGIPGTRGPIGPPGIPGFPGSKGDPGSPGPPGPAGIATKGLNGPTGPPGPPGPRGHSGEPGLPGPPGPPGPPGQAVMPEGFIKAGQRP

SEQ ID NO: 32936 - protein, 26 aa, Homo sapiens
  MAP TO AL035214.2; EXPRESSED IN PLACENTA, SIGNAL = 2.2; EXPRESSED IN HELA, SIGNAL = 1.5; EXPRESSED IN BONE MARROW, SIGNAL = 2.4; EXPRESSED IN LUNG, SIGNAL = 2.2; EXPRESSED IN HEART, SIGNAL = 2.7; EXPRESSED IN FETAL LIVER, SIGNAL = 2.1
VCASVVPSALRGLKRKSNLSRIPAGP

SEQ ID NO: 32937 - protein, 26 aa, Homo sapiens
  MAP TO AL035214.2; EXPRESSED IN PLACENTA, SIGNAL = 2.2; EXPRESSED IN HELA, SIGNAL = 1.5; EXPRESSED IN BONE MARROW, SIGNAL = 2.4; EXPRESSED IN LUNG, SIGNAL = 2.2; EXPRESSED IN HEART, SIGNAL = 2.7; EXPRESSED IN FETAL LIVER, SIGNAL = 2.1
KGKGGEISTWKNSSMKMKECLRIKER

SEQ ID NO: 32938 - protein, 379 aa, Homo sapiens
  MAP TO AL035214.2; EXPRESSED IN PLACENTA, SIGNAL = 2.2; EXPRESSED IN HELA, SIGNAL = 1.5; EXPRESSED IN BONE MARROW, SIGNAL = 2.4; EXPRESSED IN LUNG, SIGNAL = 2.2; EXPRESSED IN HEART, SIGNAL = 2.7; EXPRESSED IN FETAL LIVER, SIGNAL = 2.1; SWISSPROT HIT: Q13563, EVALUE 8.50e-01
LRVCCSQRSERPEKEEQPVQNPRRSVKAGGCMDRGPQGLRVWRAQSGPNWGPCPSPYLHEHTPYQAEPVQRRWQGLPGNSWLTCVGGVVGYVVGRRPSWRPSQLRGTLTRGEMQVVSRPAFHPMPSVSHVSSLSPLPSTPIPQERKRRGNLDMEKLFNENEGMPSNQGKIDNEEQPPHEGKPEVACILEDKKLENEGNTENTGKRVEEPLKDKEKPESAGKAKGEGKSERKGKSEMQGGSKTEGKPERGGRAEGEGEPDSEREPESEGEPESETRAAGKRPAEDDIPRKAKRKTNKGLAQYLKQYKEAIHDMNFSNEDMIREFDNMARVEDKRRKSKQKLGAFLWMQRNLQDPFYPRGPREFRGGCRAPRRDTEDIPYV

SEQ ID NO: 32939 - protein, 483 aa, Homo sapiens
  MAP TO AC005261.1; EXPRESSED IN BRAIN, SIGNAL = 1.1; EXPRESSED IN HELA, SIGNAL = 1.2; EXPRESSED IN BONE MARROW, SIGNAL =   1; EXPRESSED IN FETAL LIVER, SIGNAL = 1.1; SWISSPROT HIT: O43296, EVALUE 0.00e+00
DNTKPKTTEPTFSHLALPEEVLLQEQLTQGASKNSQLGQSKDQDGPSEMQEVHLKIGIGPQRGKLLEKMSSERDGLGSDDGVCTKITQKQVSTEGDLYECDSHGPVTDALIREEKNSYKCEECGKVFKKNALLVQHERIHTQVKPYECTECGKTFSKSTHLLQHLIIHTGEKPYKCMECGKAFNRRSHLTRHQRIHSGEKPYKCSECGKAFTHRSTFVLHHRSHTGEKPFVCKECGKAFRDRPGFIRHYIIHTGEKPYECIECGKAFNRRSYLTWHQQIHTGVKPFECNECGKAFCESADLIQHYIIHTGEKPYKCMECGKAFNRRSHLKQHQRIHTGEKPYECSECGKAFTHCSTFVLHKRTHTGEKPYECKECGKAFSDRADLIRHFSIHTGEKPYECVECGKAFNRSSHLTRHQQIHTGEKPYECIQCGKAFCRSANLIRHSIIHTGEKPYECSECGKAFNRGSSLTHHQRIHTGRNPTI

SEQ ID NO: 32940 - protein, 319 aa, Homo sapiens
  MAP TO AL132986.2; EXPRESSED IN BRAIN, SIGNAL = 1.7; EXPRESSED IN HELA, SIGNAL = 1.2; EXPRESSED IN BONE MARROW, SIGNAL = 1.2; EXPRESSED IN LUNG, SIGNAL = 3.6; SWISSPROT HIT: Q07352, EVALUE 0.00e+00
GNKMLNYSAPSAGGCLLDRKAVGTPAGGGFPRRHSVTLPSSKFHQNQLLSSLKGEPAPALSSRDSRFRDRSFSEGGERLLPTQKQPGGGQVNSSRYKTELCRPFEENGACKYGDKCQFAHGIHELRSLTRHPKYKTELCRTFHTIGFCPYGPRCHFIHNAEERRALAGARDLSADRPRLQHSFSFAGFPSAAATAAATGLLDSPTSITPPPILSADDLLGSPTLPDGTNNPFAFSSQELASLFAPSMGLPGGGSPTTFLFRPMSESPHMFDSPPSPQDSLSDQEGYLSSSSSSHSGSDSPTLDNSRRLPIFSRLSISDD

SEQ ID NO: 32941 - protein, 27 aa, Homo sapiens
  MAP TO AL132986.2; EXPRESSED IN BRAIN, SIGNAL = 1.7; EXPRESSED IN HELA, SIGNAL = 1.2; EXPRESSED IN BONE MARROW, SIGNAL = 1.2; EXPRESSED IN LUNG, SIGNAL = 3.6
WGLPSEALSHPAQLQVPPEPAPQQPQG

SEQ ID NO: 32942 - protein, 228 aa, Homo sapiens
  MAP TO AP000538.1; EXPRESSED IN BRAIN, SIGNAL = 1.1; EXPRESSED IN BONE MARROW, SIGNAL = 0.85; SWISSPROT HIT: P18175, EVALUE 5.00e-05
MNKHSEPSSSVFDSFVLEKHSDHCSTVPLSYVRDKLSEPSSSALESYVRDKHSEPSSRVLESYVRVKHSEGSSSVLESYVREKHSEPSHCVLESYVREKHSEPSHCVLESYLKDKHSDHCSTVPLSYVRDKLSEPSSSALESYVRDKHSEPSSRALESYVRVKHSEGSSSILESYVREKHSEPSHCVLESYVREKHSQLSHCVLESYLRDKHSDMCRSVLESYVRDKH

SEQ ID NO: 32943 - protein, 27 aa, Homo sapiens
  MAP TO AL121929.17; EXPRESSED IN HELA, SIGNAL =   2; EXPRESSED IN BONE MARROW, SIGNAL = 1.1
MQLCVDASQPLWMLFGLHGTITQIRIL

SEQ ID NO: 32944 - protein, 33 aa, Homo sapiens
  MAP TO AL121929.17; EXPRESSED IN HELA, SIGNAL =   2; EXPRESSED IN BONE MARROW, SIGNAL = 1.1
IASWCSRTVCGRAPSPPCGGRRCGARRTTRASR

SEQ ID NO: 32945 - protein, 233 aa, Homo sapiens
  MAP TO U34879.1; EXPRESSED IN LUNG, SIGNAL =   2; EXPRESSED IN BRAIN, SIGNAL = 1.8; EXPRESSED IN HELA, SIGNAL = 2.7; EXPRESSED IN PLACENTA, SIGNAL = 1.9; EXPRESSED IN HEART, SIGNAL = 2.2; EXPRESSED IN BONE MARROW, SIGNAL = 2.7; SWISSPROT HIT: P53332, EVALUE 2.00e-04
MAVFRSGLLVLTTPLASLAPRLASILTSAARLVNHTLYVHLQPGMSLEGPAQPQYSPVQATFEVLDFITHLYAGADVHRHLDVRILLTNIRTKSTFLPPLPTSVQNLAHPPEVVLTDFQTLDGSQYNPVKQQLVRYATSCYSCCPRLASVLLYSDYGIGEVPVEPLDVPLPSTIRPASPVAGSPKQPVRGYYRGAVGGTFDRLHNAHKVLLSVACILAQEQLVVGVADKDLLK

SEQ ID NO: 32946 - protein, 65 aa, Homo sapiens
  MAP TO U34879.1; EXPRESSED IN LUNG, SIGNAL =   2; EXPRESSED IN BRAIN, SIGNAL = 1.8; EXPRESSED IN HELA, SIGNAL = 2.7; EXPRESSED IN PLACENTA, SIGNAL = 1.9; EXPRESSED IN HEART, SIGNAL = 2.2; EXPRESSED IN BONE MARROW, SIGNAL = 2.7; SWISSPROT HIT: P17656, EVALUE 2.00e-03
PGQHGRIPVGSPGADDAAGLPSPSPGLHPDLGGPAGESHTLCSPAAGHEPGGPGSAPVQPRAGHV

SEQ ID NO: 32947 - protein, 32 aa, Homo sapiens
  MAP TO AC018725.1; EXPRESSED IN BRAIN, SIGNAL = 3.2; EXPRESSED IN HEART, SIGNAL = 2.6; EXPRESSED IN LUNG, SIGNAL = 3.5; EXPRESSED IN BONE MARROW, SIGNAL = 3.9; EXPRESSED IN FETAL LIVER, SIGNAL = 2.9
EARSKLSWSLFQKQEHMKSGPASKSGNKLQKT

SEQ ID NO: 32948 - protein, 204 aa, Homo sapiens
  MAP TO AC025436.2; EXPRESSED IN BONE MARROW, SIGNAL = 1.9; EXPRESSED IN LUNG, SIGNAL = 2.3; EXPRESSED IN FETAL LIVER, SIGNAL =   2; EXPRESSED IN HELA, SIGNAL = 2.3; EXPRESSED IN PLACENTA, SIGNAL = 1.6; EXPRESSED IN HEART, SIGNAL = 2.4; EXPRESSED IN BRAIN, SIGNAL = 2.1; SWISSPROT HIT: Q9Y5E6, EVALUE 8.00e-85
SLDYEALQAFEFRVGATDRGSPALSSEALVRVLVLDANDNSPFVLYPLQNGSAPCTELVPRAAEPGYLVTKVVAVDGDSGQNAWLSYQLLKATEPGLFGVWAHNGEVRTARLLSERDAAKHRLVVLVKDNGEPPRSATATLHVLLVDGFSQPYLPLPEAAPAQAQADLLTVYLVVALASVSSLFLFSVLLFVAVRLCRRSRAAS

SEQ ID NO: 32949 - protein, 27 aa, Homo sapiens
  MAP TO AC025436.2; EXPRESSED IN BONE MARROW, SIGNAL = 1.9; EXPRESSED IN LUNG, SIGNAL = 2.3; EXPRESSED IN FETAL LIVER, SIGNAL =   2; EXPRESSED IN HELA, SIGNAL = 2.3; EXPRESSED IN PLACENTA, SIGNAL = 1.6; EXPRESSED IN HEART, SIGNAL = 2.4; EXPRESSED IN BRAIN, SIGNAL = 2.1
PSTKVVGQKTVSQLCLRFSLATFPGRA

SEQ ID NO: 32950 - protein, 278 aa, Homo sapiens
  MAP TO AC006285.11; EXPRESSED IN BRAIN, SIGNAL = 2.2; EXPRESSED IN BONE MARROW, SIGNAL = 1.6; EXPRESSED IN FETAL LIVER, SIGNAL = 1.3; EXPRESSED IN LUNG, SIGNAL = 1.9; EXPRESSED IN HEART, SIGNAL = 2.9; SWISSPROT HIT: P34926, EVALUE 2.40e-01
GTVFSLESEEEEYPGITAEDSNDIYILPSDNSGQVSPPESPTVTTSWQSESLPVSLSASQSWHTESLPVSLGPESWQQIAMDPEEVKSLDSNGAGEKSENNSSNSDIVHVEKEEVPEGMEEAAVASVVLPARELQEALPEAPAPLLPHITATSLLGTREPDTEVITVEKSSPATSLFVELDEEEVKAATTEPTEVEEVVPALEPTETLLSEKEINAREESLVEELSPASEKKPVPPSEGKSRLSPAGEMKPMPLSEGKSILLFGGAAAVAILAVAIGV

SEQ ID NO: 32951 - protein, 18 aa, Homo sapiens
  MAP TO AC007111.1; EXPRESSED IN BONE MARROW, SIGNAL = 0.77; EXPRESSED IN BRAIN, SIGNAL = 0.83; SWISSPROT HIT: Q92874, EVALUE 2.00e-04
SQPLGRDQYKEMYLFVYR

SEQ ID NO: 32952 - protein, 213 aa, Homo sapiens
  MAP TO AC007111.1; EXPRESSED IN BONE MARROW, SIGNAL = 0.77; EXPRESSED IN BRAIN, SIGNAL = 0.83; SWISSPROT HIT: Q92874, EVALUE 2.00e-33
ILAGYDLALVQEVRDPDLSAVSALMEQINRCGGQGPSSRPPAGISPRRGAPTLSGPLSPQRVRARVQLCEQPAPGPGPVQGDVPVRVQVRGGPQGGARGAAGRGLSGSSPSPRKDAVSVVDTYLYPDPEDVFSREPFVVKFSAPGTGERAPPLPSRRALTPPPLPAAAQNLVLIPLHAAPHQAVAEIDALYDVYLDVIDKWGTDVSPPLGPGV

SEQ ID NO: 32953 - protein, 20 aa, Homo sapiens
  MAP TO AP000884.1; EXPRESSED IN HELA, SIGNAL = 0.97; EXPRESSED IN BONE MARROW, SIGNAL = 1.2; EXPRESSED IN FETAL LIVER, SIGNAL = 0.96; EXPRESSED IN LUNG, SIGNAL = 1.2
HRDEHHHARDDEDDSSRQQN

SEQ ID NO: 32954 - protein, 257 aa, Homo sapiens
  MAP TO AP001760.1; EXPRESSED IN HELA, SIGNAL = 0.79; EXPRESSED IN BONE MARROW, SIGNAL = 1.2; EXPRESSED IN LUNG, SIGNAL = 1.2; EXPRESSED IN FETAL LIVER, SIGNAL = 1.3; SWISSPROT HIT: O95613, EVALUE 0.00e+00
GKEKVLEDCQLPKVDLVAQVKQLQEKLNRLLYSMTFQNVDAADTKSLWPMASAHLLESSWSDDSCDGEEPDISPHIDTCDANTATGGVTDVIKNQAIDACDANTTPGGVTDVIKNWDSLIPDEMPDSPIQEKSECQDMSLSSPTSVLGGSRHQSHTAEAGPRKSPVGMLDLSSWSSPEVLRKDWTLEPWPSLPVTPHSGALSLCSADTSLGDRADTSLPQTQGPGLLCSPGVSAAALALQWAESPPADDHHVQRTAV

SEQ ID NO: 32955 - protein, 48 aa, Homo sapiens
  MAP TO AP001760.1; EXPRESSED IN HELA, SIGNAL = 0.79; EXPRESSED IN BONE MARROW, SIGNAL = 1.2; EXPRESSED IN LUNG, SIGNAL = 1.2; EXPRESSED IN FETAL LIVER, SIGNAL = 1.3; SWISSPROT HIT: Q08274, EVALUE 2.20e+00
YLVAPATRATLQRLGPGRARSGCWTCLPGAPLRSSGRTGPWSPGPASP

SEQ ID NO: 32956 - protein, 32 aa, Homo sapiens
  MAP TO Z69923.1; EXPRESSED IN PLACENTA, SIGNAL =   3; EXPRESSED IN BRAIN, SIGNAL = 1.6; EXPRESSED IN BONE MARROW, SIGNAL = 1.2; EXPRESSED IN FETAL LIVER, SIGNAL = 1.3; EXPRESSED IN LUNG, SIGNAL = 1.1; EXPRESSED IN HEART, SIGNAL = 1.3
GGEGQMEAIRAASTYKKSKSKTISHPWRVCRD

SEQ ID NO: 32957 - protein, 273 aa, Homo sapiens
  MAP TO AC023123.3; EXPRESSED IN PLACENTA, SIGNAL = 1.5; EXPRESSED IN BRAIN, SIGNAL = 1.1; EXPRESSED IN LUNG, SIGNAL = 0.94; EXPRESSED IN BONE MARROW, SIGNAL = 0.8; SWISSPROT HIT: Q12830, EVALUE 0.00e+00
RRKPRVHRPRSPILEEKDIPPLEFPKSSEDLMVPNEHIMNVIAIYEVLRNFGTVLRLSPFRFEDFCAALVSQEQCTLMAEMHVVLLKAVLREEDTSNTTFGPADLKDSVNSTLYFIDGMTWPEVLRVYCESDKEYHHVLPYQEAEDYPYGPVENKIKVLQFLVDQFLTTNIAREELMSEGVIQYDDHCRVCHKLGDLLCCETCSAVYHLECVKPPLEEVPEDEWQCEVCVAHKVPGVTDCVAEIQKNKPYIRHEPIGYDRSRRKYWFLNRRLI

SEQ ID NO: 32958 - protein, 31 aa, Homo sapiens
  MAP TO AC023123.3; EXPRESSED IN PLACENTA, SIGNAL = 1.5; EXPRESSED IN BRAIN, SIGNAL = 1.1; EXPRESSED IN LUNG, SIGNAL = 0.94; EXPRESSED IN BONE MARROW, SIGNAL = 0.8
VGENQEYIGLVLLYWKKKTSRPLNFPSPLRI

SEQ ID NO: 32959 - protein, 152 aa, Homo sapiens
  MAP TO AC017024.3; EXPRESSED IN BRAIN, SIGNAL = 1.7; EXPRESSED IN HEART, SIGNAL = 1.7; EXPRESSED IN LUNG, SIGNAL = 1.8; EXPRESSED IN FETAL LIVER, SIGNAL = 1.6; EXPRESSED IN BONE MARROW, SIGNAL = 1.5; EXPRESSED IN PLACENTA, SIGNAL = 1.9; EXPRESSED IN HELA, SIGNAL = 2.3; SWISSPROT HIT: P03360, EVALUE 2.00e-10
NSQADSEAYKAASTQYRASVTAALLPQAPDLVPAYSKEERDFFQAEGEQAIKEGRIQLPDGRVAVPQLLGAAAVLAVHETTYLGQESLEKLLGWYFYISRLSALAKTVTEQGVTCRQHNVRQGPTVPPGIQAYGSALFEDLQVDFTEMPKCG

SEQ ID NO: 32960 - protein, 71 aa, Homo sapiens
  MAP TO AF042089.1; EXPRESSED IN BRAIN, SIGNAL = 1.3; EXPRESSED IN HELA, SIGNAL = 1.2; EXPRESSED IN BONE MARROW, SIGNAL = 1.1; EXPRESSED IN FETAL LIVER, SIGNAL = 1.3; EXPRESSED IN LUNG, SIGNAL = 1.2; SWISSPROT HIT: Q01285, EVALUE 5.90e+00
SRPTTPPGLIGTSCSCSSLTAKKGGESSKQQLSGQRNMHQLIIKTPKSMEGLSGQEPTPSWTHMKERIWKG

SEQ ID NO: 32961 - protein, 19 aa, Homo sapiens
  MAP TO AF238380.1; EXPRESSED IN BRAIN, SIGNAL = 1.1; EXPRESSED IN HELA, SIGNAL = 0.98; EXPRESSED IN BONE MARROW, SIGNAL =   1; EXPRESSED IN LUNG, SIGNAL = 0.97; EXPRESSED IN FETAL LIVER, SIGNAL =   1
GRPSPASRGRSRRQWRRRR

SEQ ID NO: 32962 - protein, 100 aa, Homo sapiens
  MAP TO AF238380.1; EXPRESSED IN BRAIN, SIGNAL = 1.1; EXPRESSED IN HELA, SIGNAL = 0.98; EXPRESSED IN BONE MARROW, SIGNAL =   1; EXPRESSED IN LUNG, SIGNAL = 0.97; EXPRESSED IN FETAL LIVER, SIGNAL =   1
AGRGTPQVCVAPAPPRPVAARALRAGGGAAASGGGGGRGGGDGGEGGEEGGGGGEGGGEGGGGGEGGGGGEGGRHREGGDGGEGGRRWEGGDGGGSGPPG

SEQ ID NO: 32963 - protein, 225 aa, Homo sapiens
  MAP TO AC021287.4; EXPRESSED IN LUNG, SIGNAL = 1.4; EXPRESSED IN HEART, SIGNAL =   4; EXPRESSED IN PLACENTA, SIGNAL = 1.4; EXPRESSED IN BRAIN, SIGNAL = 1.2; EXPRESSED IN HELA, SIGNAL = 1.8; EXPRESSED IN BONE MARROW, SIGNAL = 0.99; EXPRESSED IN FETAL LIVER, SIGNAL =   1; SWISSPROT HIT: P37370, EVALUE 5.10e-02
SGRGAQLFAKRQSRMEKYVVDSDTVQAHAARAQSPTPSLPASWKYSSNVRAPPPVAYNPIHSPSYPLAALKSQPSAAQPSKMGKKKGKKPLNALDVMKHQPYQLNASLFTFQPPDAKDGLPQKSSVKVNSALAMKQALPPRPVNAASPTNVQASSVYSVPAYTSPPSFFAEASSPVSASPVPVGIPTSPKQESASSSYFVAPRPKFSAKKSGVTIQVWKPSVVEE

SEQ ID NO: 32964 - protein, 30 aa, Homo sapiens
  MAP TO AL132709.2; EXPRESSED IN HELA, SIGNAL = 1.1; EXPRESSED IN BONE MARROW, SIGNAL = 0.97; EXPRESSED IN FETAL LIVER, SIGNAL =   1
CWSPTKQASKQRALSTAPARFLTLETSTPE

SEQ ID NO: 32965 - protein, 18 aa, Homo sapiens
  MAP TO AL132709.2; EXPRESSED IN HELA, SIGNAL = 1.1; EXPRESSED IN BONE MARROW, SIGNAL = 0.97; EXPRESSED IN FETAL LIVER, SIGNAL =   1
ITSQGGPGTHRSQQEWNR

SEQ ID NO: 32966 - protein, 50 aa, Homo sapiens
  MAP TO U69568.1; EXPRESSED IN BRAIN, SIGNAL = 0.94; EXPRESSED IN BONE MARROW, SIGNAL =   1; EXPRESSED IN HEART, SIGNAL = 1.2; EXPRESSED IN HELA, SIGNAL = 0.34; SWISSPROT HIT: P03291, EVALUE 3.30e-01
CSTGSPGSCSPKIGCRKTTWSTGRCPAVILRTTSSCGVPRPTLKPAMRRS

SEQ ID NO: 32967 - protein, 82 aa, Homo sapiens
  MAP TO U69568.1; EXPRESSED IN BRAIN, SIGNAL = 0.94; EXPRESSED IN BONE MARROW, SIGNAL =   1; EXPRESSED IN HEART, SIGNAL = 1.2; EXPRESSED IN HELA, SIGNAL = 0.34; SWISSPROT HIT: P43362, EVALUE 5.00e-45
EHMFYGEPRKLLTQDWVQENYLEYRQVPGSDPAHYEFLWGSKAHAETSYEKVINYLVMLNAREPICYPSLYEEVLGEEQEGV

SEQ ID NO: 32968 - protein, 151 aa, Homo sapiens
  MAP TO AF030453.1; EXPRESSED IN HELA, SIGNAL = 0.9; EXPRESSED IN PLACENTA, SIGNAL = 1.8; EXPRESSED IN BRAIN, SIGNAL = 1.9; EXPRESSED IN HEART, SIGNAL = 2.5; EXPRESSED IN LUNG, SIGNAL =   2; EXPRESSED IN BONE MARROW, SIGNAL = 2.4
AGPHAPCRARVPGLLERLARPALLLQPRRGRLPACLALRRRRRLLVFRLVVLCRVGARPPAPRRGPAQRAEPQQQRRAPAGGRGRHRRRGAPGGRARPRARRGEPVLLLLARGAARVGHAKLFSEDTMLLKACFRDCTRLSCRPFSHGEGG

SEQ ID NO: 32969 - protein, 110 aa, Homo sapiens
  MAP TO AF030453.1; EXPRESSED IN HELA, SIGNAL = 0.9; EXPRESSED IN PLACENTA, SIGNAL = 1.8; EXPRESSED IN BRAIN, SIGNAL = 1.9; EXPRESSED IN HEART, SIGNAL = 2.5; EXPRESSED IN LUNG, SIGNAL =   2; EXPRESSED IN BONE MARROW, SIGNAL = 2.4
LPRPRPRPAGATRPASTTSPASPRPPARLPRPPTPPAPPRLPPRRPLPRRGPPPRAPSRASSARGAAATAPSACWRPWPPPPPRSPRRPRPAARAPWRTSTPSTSPRRRP

SEQ ID NO: 32970 - protein, 76 aa, Homo sapiens
  MAP TO Z73639.1; EXPRESSED IN LUNG, SIGNAL = 1.7; EXPRESSED IN BONE MARROW, SIGNAL = 1.8; EXPRESSED IN FETAL LIVER, SIGNAL = 1.8; EXPRESSED IN HELA, SIGNAL = 3.4; SWISSPROT HIT: P98160, EVALUE 3.80e-01
LLVIVPLLFPLLLQLLTVISSYGQFVNAVAGTSPNHQSCRHPTHFPSPAHAQVCASLGAGQERALLHLIEEVSQVQ

SEQ ID NO: 32971 - protein, 179 aa, Homo sapiens
  MAP TO Z85996.1; EXPRESSED IN HELA, SIGNAL = 1.1; EXPRESSED IN BONE MARROW, SIGNAL = 0.84; SWISSPROT HIT: O77621, EVALUE 6.00e-06
LHSLTHSLMMNITPSDLLFLACVVPVLLLSFLQHNWWLGPAICTISQATNTATTFCIFYSMVATALLRHVAVARPDLAFPAGWGTLLLLCGAMWALGLTESLPNWLFQRVAVEEETAGAPKTQACLLLLSPAGTSCYISLLGALAFLPCTLGLGCSFSHVGWLLWTQPQGPMGESIQEH

SEQ ID NO: 32972 - protein, 240 aa, Homo sapiens
  MAP TO AL096708.11; EXPRESSED IN BRAIN, SIGNAL =   1; EXPRESSED IN HEART, SIGNAL = 1.3; EXPRESSED IN BONE MARROW, SIGNAL =   1; EXPRESSED IN HELA, SIGNAL =   1; SWISSPROT HIT: P27571, EVALUE 8.60e+00
WMPGFVCPWPPRWRRAWMPGFVCPWPPRWRRAWMPGFVCPCPSRWRRAWMPGFVCPCPPQWRRAWMPSFVCPCLPRWRRAWMPGFVCPCPSRWRRAWMPGFVCPCPSWWRRAWMPSFVCPWPPRWRRAWMPGFVCPCPSRWRRAWMPGFVCPCPSRWRRAWMPGFVCPWPPRWRRAWMPGFVCPCLPRWRRAWMPGFVCPWPPWWRRAWMPGFVCPWPPRWRRAWMPGFVCPCCGCVVVR

SEQ ID NO: 32973 - protein, 20 aa, Homo sapiens
  MAP TO AC007255.2; EXPRESSED IN LUNG, SIGNAL = 0.92; EXPRESSED IN BONE MARROW, SIGNAL = 0.99; EXPRESSED IN FETAL LIVER, SIGNAL = 1.1; EXPRESSED IN HELA, SIGNAL = 2.6
HFIQWLNTLSFPQYMDQSQR

SEQ ID NO: 32974 - protein, 578 aa, Homo sapiens
  MAP TO AF186192.1; EXPRESSED IN HELA, SIGNAL = 3.1; EXPRESSED IN FETAL LIVER, SIGNAL = 1.4; EXPRESSED IN BONE MARROW, SIGNAL = 1.7; EXPRESSED IN LUNG, SIGNAL = 1.5; SWISSPROT HIT: Q99676, EVALUE 0.00e+00
SEVGTKKELSILNQKFSEEVKTPEFVSRRLLRDNAQAAEFREAWGREGKLKERVGNSAGQSLNKPNIHKRVLTEATVGRERSLGERTQECSAFDRNLNLDQNVVRLQRNKTGERVFKCDICSKTFKYNSDLSRHQRSHTGEKPYECGRCGRAFTHSSNLVLHHHIHTGNKPFKCDECGKTFGLNSHLRLHRRIHTGEKPFGCGECGKAFSRSSTLIQHRIIHTGEKPYKCNECGRGFSQSPQLTQHQRIHTGEKPHECSHCGKAFSRSSSLIQHERIHTGEKPHKCNQCGKAFSQSSSLFLHHRVHTGEKPYVCNECGRAFGFNSHLTEHVRIHTGEKPYVCNECGKAFRRSSTLVQHRRVHTGEKPYQCVECGKAFSQSSQLTLHQRVHTGEKPYDCGDCGKAFSRRSTLIQHQKVHSGETRKCRKHGPAFVHGSSLTADGQIPTGEKHGRAFNHGANLILRWTVHTGEKSFGCNEYGKAFSPTSRPTEDQIMHAGEKPYKCQECGNAFSGKSTLIQHQVTHTGQKPCHCSVYGKAFSQSSQLTPPQQTRVGEKPALNDGSKRYFIHIKKIFQERHF

SEQ ID NO: 32975 - protein, 187 aa, Homo sapiens
  MAP TO AH009144.1; EXPRESSED IN BRAIN, SIGNAL = 1.3; EXPRESSED IN HELA, SIGNAL = 1.2; EXPRESSED IN BONE MARROW, SIGNAL = 1.3; EXPRESSED IN LUNG, SIGNAL =   1; EXPRESSED IN FETAL LIVER, SIGNAL = 1.3; SWISSPROT HIT: P08547, EVALUE 4.00e-66
LNQEDIETLNRPITRSKIEMVKKNANKNSPGPEGFTAEFYQAFKEELVPILLTLFQKIEKEEIFPKSFYEVSITLIPEPGRDTTKKENYRPISLMNIDAKVLNKILVSQIQQHIKKIIHHDQLGFRPGMQGWFNIGKSITVIHHTNRIKNKNHMIISRDTEKAFDEIQHPFMIKTLSKIGTEETCLK

SEQ ID NO: 32976 - protein, 36 aa, Homo sapiens
  MAP TO AH009144.1; EXPRESSED IN BRAIN, SIGNAL = 1.3; EXPRESSED IN HELA, SIGNAL = 1.2; EXPRESSED IN BONE MARROW, SIGNAL = 1.3; EXPRESSED IN LUNG, SIGNAL =   1; EXPRESSED IN FETAL LIVER, SIGNAL = 1.3; SWISSPROT HIT: Q09204, EVALUE 1.70e+00
ARLKWLKKMPIKIVQDQKDSQLNSIRHSKKNWYQSY

SEQ ID NO: 32977 - protein, 226 aa, Homo sapiens
  MAP TO Z69638.1; EXPRESSED IN HELA, SIGNAL = 2.1; EXPRESSED IN PLACENTA, SIGNAL = 2.3; EXPRESSED IN BRAIN, SIGNAL = 1.7; EXPRESSED IN BONE MARROW, SIGNAL = 1.9; EXPRESSED IN LUNG, SIGNAL = 1.5; EXPRESSED IN HEART, SIGNAL = 2.1; EXPRESSED IN FETAL LIVER, SIGNAL = 1.6; SWISSPROT HIT: P09012, EVALUE 4.80e-01
ARQCAPRPALPPPLPVAATSARQCAHAQLCPHPYLLLPPVPGSVPTPSSAPTPTCCCHQCQAVCPRPALPPPLPVAATSARQCAPRPALPPPLPVAATSARQCAPRPALPPPLPVAATSARQCAPRPALPPPPSPEPTCRCALVGGAPPWLPPRPQLSQASVPASVIPPGHIPQECGWPGDKQPSPSHLLLASQGLGVLQVVTQTPPLLVLLVRDPLRSPGAPSGS

SEQ ID NO: 32978 - protein, 595 aa, Homo sapiens
  MAP TO AC010680.2; EXPRESSED IN BRAIN, SIGNAL = 0.98; EXPRESSED IN HELA, SIGNAL = 0.51; EXPRESSED IN BONE MARROW, SIGNAL =   1; EXPRESSED IN HEART, SIGNAL = 4.6; SWISSPROT HIT: Q90688, EVALUE 8.00e-52
PPSVELDVKLIEGLVVKAGTTVRFPAIIRGVPVPTAKWTTDGSEIKTDEHYTVETDNFSSVLTIKNCLRRDTGEYQITVSNAAGSKTVAVHLTVLDVPGPPTGPINILDVTPEHMTISWQPPKDDGGSPVINYIVEKQDTRKDTWGVVSSGSSKTKLKIPHLQKGCEYVFRVRAENKIGVGPPLDSTPTVAKHKFSPPSPPGKPVVTDITENAATVSWTLPKSDGGSPITGYYMERREVTGKWVRVNKTPIADLKFRVTGLYEGNTYEFRVFAENLAGLSKPSPSSDPIKACRPIKPPGPPINPKLKDKSRETADLVWTKPLSDGGSPILGYVVECQKPGTAQWNRINKDELIRQCAFRVPGLIEGNEYRFRIKAANIVGEGEPRELAESVIAKDILHPPEVELDVTCRDVITVRVGQTIRILARVKGRPEPDITWTKEGKVLVREKRVDLIQDLPRVELQIKEAVRADHGKYIISAKNSSGHAQGSAIVNVLDRPGPCQNLKVTNVTKENCTISWENPLDNGGSEITNFIVEYRKPNQKGWSIVASDVTKRLIKANLLANNEYYFRVCAENKVGVGPTIETKTPILAINPIDRP

SEQ ID NO: 32979 - protein, 58 aa, Homo sapiens
  MAP TO AC006272.1; EXPRESSED IN LUNG, SIGNAL = 1.2; EXPRESSED IN FETAL LIVER, SIGNAL = 0.94; EXPRESSED IN PLACENTA, SIGNAL = 1.6; EXPRESSED IN BRAIN, SIGNAL =   1; EXPRESSED IN HELA, SIGNAL = 1.3; EXPRESSED IN BONE MARROW, SIGNAL = 0.91; SWISSPROT HIT: P25089, EVALUE 2.00e-26
CLNPILYVFMGRNFQERLIRSLPTSLERALTEVPDSAQTSNTDTTSASPPEETELQAM

SEQ ID NO: 32980 - protein, 314 aa, Homo sapiens
  MAP TO AP001705.1; EXPRESSED IN BONE MARROW, SIGNAL = 0.77; EXPRESSED IN HELA, SIGNAL = 0.8; SWISSPROT HIT: O14867, EVALUE 0.00e+00
MCLEKDAALALPSLCPKYRKFQKAFGTDRVRTGESSVKDIHASVQPNERSENECLGGVPECRDLQVMLKCDESKLAMEPEETKKDPASQCPTEKSEVTPFPHNSSIDPHGLYSLSLLHTYDQYGDLNFAGMQNTTVLTEKPLSGTDVQEKTFGESQDLPLKSDLGTREDSSVASSDRSSVEREVAEHLAKGFWSDICSTDTPCQMQLSPAVAKDGSEQISQKRSECPWLGIRISESPEPGQRTFTTLSSVNCPFISTLSTEGCSSNLEIGNDDYVSEPQQEPCPYACVISLGDDSETDTEGDSESCSAREQECE

SEQ ID NO: 32981 - protein, 90 aa, Homo sapiens
  MAP TO AC007159.4; EXPRESSED IN PLACENTA, SIGNAL = 2.2; EXPRESSED IN HELA, SIGNAL = 0.79; EXPRESSED IN LUNG, SIGNAL = 1.5; EXPRESSED IN HEART, SIGNAL = 1.8; EXPRESSED IN BONE MARROW, SIGNAL = 1.5; SWISSPROT HIT: O95416, EVALUE 3.00e-37
MSKPSDHIKRPMNAFMVWSRGQRRKMAQENPKMHNSEISKRLGAEWKLLSEAEKRPYIDEAKRLRAQHMKEHPDYKYRPRRKPKNLLKKD

SEQ ID NO: 32982 - protein, 242 aa, Homo sapiens
  MAP TO AP000287.1; EXPRESSED IN HELA, SIGNAL = 0.48; EXPRESSED IN BONE MARROW, SIGNAL = 0.88; SWISSPROT HIT: Q13516, EVALUE 2.00e-74
TSSSTSSAAASSTKKDKKQMTEPELQQLRLKINSRERKRMHDLNIAMDGLREVMPYAHGPSVRKLSKIATLLLARNYILMLTNSLEEMKRLVSEIYGGHHAGFHPSACGGLAHSAPLPAATAHPAAAAHAAHHPAVHHPILPPAAAAAAAAAAAAAVSSASLPGSGLPSVGSIRPPHGLLKSPSAAAAAPLGGGGGGSGASGGFQHWGGMPCPCSMCQVPPPHHHVSAMGAGSLPRLTSDAK

SEQ ID NO: 32983 - protein, 71 aa, Homo sapiens
  MAP TO AP000287.1; EXPRESSED IN HELA, SIGNAL = 0.48; EXPRESSED IN BONE MARROW, SIGNAL = 0.88; SWISSPROT HIT: P79777, EVALUE 1.10e+00
FSGPREGGPCESCDDYLPLGPWTRTPAWCPAARRRQSPMTFFCRPGVRAAAAAPSLGAPCPRPPRVTARRS

SEQ ID NO: 32984 - protein, 230 aa, Homo sapiens
  MAP TO AL109928.12; EXPRESSED IN HELA, SIGNAL = 1.2; EXPRESSED IN BONE MARROW, SIGNAL = 0.91; EXPRESSED IN BRAIN, SIGNAL = 0.92; SWISSPROT HIT: P40036, EVALUE 7.00e-03
LGSRKLGPRSLSCLSDLDGGVALEPRACRPPGSPGRAPPPTPAPSGCDPRLRPIILRRARSLPSSPERRQKAAGAPGAACRPGCSQKLRVRFADALGLELAQVKVFNAGDDPSVPLHVLSRLAINSDLCCSSQDLEFTLHCLVPDFPPPVEAADFGERLQRQLVCLERVTCSDLGISGTVRVCNVAFEKQVAVRYTFSGWRSTHEAVARWRGPAGPEGTEDVFTFGFPVP

SEQ ID NO: 32985 - protein, 18 aa, Homo sapiens
  MAP TO AC016786.4; EXPRESSED IN BRAIN, SIGNAL = 1.2; EXPRESSED IN BONE MARROW, SIGNAL = 1.3; EXPRESSED IN FETAL LIVER, SIGNAL =   1; EXPRESSED IN LUNG, SIGNAL = 1.1; EXPRESSED IN HELA, SIGNAL = 1.4
RSTRPAARSARCTLSGRT

SEQ ID NO: 32986 - protein, 22 aa, Homo sapiens
  MAP TO AP001717.1; EXPRESSED IN BRAIN, SIGNAL = 0.94; EXPRESSED IN HELA, SIGNAL = 0.57; EXPRESSED IN BONE MARROW, SIGNAL = 0.84; EXPRESSED IN HEART, SIGNAL = 1.2
DPFWLVSIIDQYSVQVVSHGIN

SEQ ID NO: 32987 - protein, 326 aa, Homo sapiens
  MAP TO AC002326.1; EXPRESSED IN HELA, SIGNAL = 0.49; EXPRESSED IN BRAIN, SIGNAL = 1.6; EXPRESSED IN BONE MARROW, SIGNAL = 0.86; SWISSPROT HIT: P54253, EVALUE 0.00e+00
MKSNQERSNECLPPKKREIPATSRSSEEKAPTLPSDNHRVEGTAWLPGNPGGRGHGGGRHGPAGTSVELGLQQGIGLHKALSTGLDYSPPSAPRSVPVATTLPAAYATPQPGTPVSPVQYAHLPHTFQFIGSSQYSGTYASFIPSQLIPPTANPVTSAVASAAGATTPSQRSQLEAYSTLLANMGSLSQTPGHKAEQQQQQQQQQQQQHQHQQQQQQQQQQQQQQQHLSRAPGLITPGSPPPAQQNQYVHISSSPQNTGRTASPPAIPVHLHPHQTMIPHTLTLGPPSQVVMQYADSGSHFVPREATKKAESSRLQQAIQAKEVLN

SEQ ID NO: 32988 - protein, 133 aa, Homo sapiens
  MAP TO AC011334.1; EXPRESSED IN PLACENTA, SIGNAL = 1.6; EXPRESSED IN BRAIN, SIGNAL =   1; EXPRESSED IN HELA, SIGNAL =   2; EXPRESSED IN BONE MARROW, SIGNAL = 1.1; SWISSPROT HIT: P07550, EVALUE 1.00e-74
MHWYRATHQEAINCYANETCCDFFTNQAYAIASSIVSFYVPLVIMVFVYSRVFQEAKRQLQKIDKSEGRFHVQNLSQVEQDGRTGHGLRRSSKFCLKEHKALKTLGIIMGTFTLCWLPFFIVNIVHVIQDNLI

SEQ ID NO: 32989 - protein, 57 aa, Homo sapiens
  MAP TO AC011334.1; EXPRESSED IN PLACENTA, SIGNAL = 1.6; EXPRESSED IN BRAIN, SIGNAL =   1; EXPRESSED IN HELA, SIGNAL =   2; EXPRESSED IN BONE MARROW, SIGNAL = 1.1; SWISSPROT HIT: Q02817, EVALUE 2.30e-02
WCGLCQALPPSCPFRCTGTGPPTRKPSTAMPMRPAVTSSRTKPMPLPLPSCPSTFPW

SEQ ID NO: 32990 - protein, 34 aa, Homo sapiens
  MAP TO Z84480.1; EXPRESSED IN HELA, SIGNAL = 1.8; EXPRESSED IN BRAIN, SIGNAL = 1.1; EXPRESSED IN BONE MARROW, SIGNAL = 8.8; SWISSPROT HIT: Q99439, EVALUE 5.00e-11
AMVSYGMNTVDLFDANDLFESGNMTQLQVSLLAL

SEQ ID NO: 32991 - protein, 138 aa, Homo sapiens
  MAP TO AC004616.1; EXPRESSED IN BONE MARROW, SIGNAL = 0.83; EXPRESSED IN PLACENTA, SIGNAL = 2.1; EXPRESSED IN BRAIN, SIGNAL =   1; EXPRESSED IN HELA, SIGNAL = 1.7; SWISSPROT HIT: P00966, EVALUE 6.00e-48
VPGVLVVHCTVKTDSRCRELTPPIPDAVSSKGSMVLAHSGGLDTSCILMWLKEQGHDVIAYLAKISQKEDFEDDRKKAWKLGAKKVFIDDVSRDFVEEFIWPAIQSSILYEDYYLLGTSLARPCIAHKQVEITQQEGT

SEQ ID NO: 32992 - protein, 38 aa, Homo sapiens
  MAP TO AC004616.1; EXPRESSED IN BONE MARROW, SIGNAL = 0.83; EXPRESSED IN PLACENTA, SIGNAL = 2.1; EXPRESSED IN BRAIN, SIGNAL =   1; EXPRESSED IN HELA, SIGNAL = 1.7; SWISSPROT HIT: Q14209, EVALUE 3.80e+00
QIPDAGNSHLQSQTLCPAKAPWFWPTVVAWTPPASSCG

SEQ ID NO: 32993 - protein, 201 aa, Homo sapiens
  MAP TO Z54335.1; EXPRESSED IN BRAIN, SIGNAL =   1; EXPRESSED IN HELA, SIGNAL = 1.5; EXPRESSED IN LUNG, SIGNAL = 0.98; EXPRESSED IN HEART, SIGNAL = 1.4; EXPRESSED IN BONE MARROW, SIGNAL = 1.2; SWISSPROT HIT: P16053, EVALUE 9.00e-06
TRHPDGGTRRRCLEKSTEHVRAPETRAEHARVLETNPHRARESPAHPRRARESPGNRLTEHVRAPETRAEHARVPETNPHRACESPAHPRRARESPGNRPTPSKREPRKRTNAEQVRAPEIDQRRARGSPRKPTCAEHARVPETRAEHAVVLETDPRRARESPGNRPTRSTREPRKPTRTKHAGATASFHAPPTCWASSEF

SEQ ID NO: 32994 - protein, 155 aa, Homo sapiens
  MAP TO AF002994.1; EXPRESSED IN HELA, SIGNAL = 2.8; EXPRESSED IN BRAIN, SIGNAL = 0.99; EXPRESSED IN LUNG, SIGNAL = 0.94; EXPRESSED IN BONE MARROW, SIGNAL = 1.1; SWISSPROT HIT: P43357, EVALUE 2.00e-81
LVFGIELMEVDPIGHLYIFATCLGLSYDGLLGDNQIMPKAGLLIIVLAIIAREGDCAPEEKIWEELSVLEVFEGREDSILGDPKKLLTQHFVQENYLEYRQVPGSDPACYEFLWGPRALVETSYVKVLHHMVKISGGPHISYPPLHEWVLREGEE

SEQ ID NO: 32995 - protein, 23 aa, Homo sapiens
  MAP TO AF002994.1; EXPRESSED IN HELA, SIGNAL = 2.8; EXPRESSED IN BRAIN, SIGNAL = 0.99; EXPRESSED IN LUNG, SIGNAL = 0.94; EXPRESSED IN BONE MARROW, SIGNAL = 1.1
VGLHCPAPAHTPACCPDQSHHAS

SEQ ID NO: 32996 - protein, 348 aa, Homo sapiens
  MAP TO U95626.1; EXPRESSED IN HELA, SIGNAL = 1.4; EXPRESSED IN BRAIN, SIGNAL = 0.99; EXPRESSED IN PLACENTA, SIGNAL = 2.1; EXPRESSED IN LUNG, SIGNAL = 1.5; EXPRESSED IN BONE MARROW, SIGNAL = 1.4; SWISSPROT HIT: O97883, EVALUE 9.00e-63
GSLKMANYTLAPEDEYDVLIEGELESDEAEQCDKYDAQALSAQLVPSLCSAVFVIGVLDNLLVVLILVKYKGLKRVENIYLLNLAVSNLCFLLTLPFWAHAGGDPMCKILIGLYFVGLYSETFFNCLLTVQRYLVFLHKGNFFSARRRVPCGIITSVLAWVTAILATLPEYVVYKPQMEDQKYKCAFSRTPFLPADETFWKHFLTLKMNISVLVLPLFIFTFLYVQMRKTLRFREQRYSLFKLVFAIMVVFLLMWAPYNIAFFLSTFKEHFSLSDCKSSYNLDKSVHITKLIATTHCCINPLLYAFLDGTFSKYLCRCFHLRSNTPLQPRGQSAQGTSREEPDHSTEV

SEQ ID NO: 32997 - protein, 22 aa, Homo sapiens
  MAP TO U95626.1; EXPRESSED IN HELA, SIGNAL = 1.4; EXPRESSED IN BRAIN, SIGNAL = 0.99; EXPRESSED IN PLACENTA, SIGNAL = 2.1; EXPRESSED IN LUNG, SIGNAL = 1.5; EXPRESSED IN BONE MARROW, SIGNAL = 1.4
VTSMTPRHSQPSWCHHSALLCL

SEQ ID NO: 32998 - protein, 454 aa, Homo sapiens
  MAP TO AL117328.5; EXPRESSED IN BRAIN, SIGNAL = 1.2; EXPRESSED IN HELA, SIGNAL = 1.2; EXPRESSED IN LUNG, SIGNAL = 1.2; EXPRESSED IN BONE MARROW, SIGNAL = 1.1; EXPRESSED IN FETAL LIVER, SIGNAL = 0.94; SWISSPROT HIT: P08770, EVALUE 2.00e-09
SHLKEAESGVIHFTSGIWMSNQTREYLTLTAHWVSFESPARPRCDDHHCSALLDVSQVDCDYSGNSIQKQLECWWEAWVTSTGLQVGITVTDNASIGKTLNEGEHSSVQCFSHTVNLIVSEAIKSQRMVQNLLSLARKICERVHRSPKAKEKLAELQREYALPQHHLIQDVPSKWSTSFHMLERLIEQKRAINEMSVECNFRELISCDQWEVMQSVCRALKPFEAASREMSTQMSTLSQVIPMVHILNRKVEMLFEETMGIDTMLRSLKEAMVSRLSATLHDPRYVFATLLDPRYKASLFTEEEAEQYKQDLIRELELMNSTSEDVAASHRCDAGSPSKDSAAEENLWSLVAKVKKKDPREKLPEAMVLAYLEEEVLEHSCDPLTYWNLKKASWPGLSALAVRFLGCPPSIVPSEKLFNTPTENGSLGQSRLMMEHFEKLIFLKVNLPLIYFQY

SEQ ID NO: 32999 - protein, 274 aa, Homo sapiens
  MAP TO AC004922.2; EXPRESSED IN HELA, SIGNAL = 1.4; EXPRESSED IN LUNG, SIGNAL = 1.1; EXPRESSED IN BONE MARROW, SIGNAL = 1.2; EXPRESSED IN BRAIN, SIGNAL = 1.2; SWISSPROT HIT: O08789, EVALUE 8.80e-02
VWRLMLSLGLQPSRDSYNLLLVAARDCGLGDPQVASELLLKPREEATVLQPPVSRQRPRRTAQAKAGNLMSAMLHVEALERQLFLEPSQALGPPEPPEARVPGKAQPEVDTKAEPSHTAALTAVALKPPPVELEVNLLTPGAVPPTVVSFGTVTTPADRLALIGGLEGFLSKMAEHRQQPDIRTLTLLAEVVESGSPAESLLLALLDEHQVEADLTFFNTLVRKKSKLGDLEGAKALLPVLAKRGLVPNLQTFCNLAIGCHRPKDGLQLLTDMK

SEQ ID NO: 33000 - protein, 193 aa, Homo sapiens
  MAP TO AC002494.1; EXPRESSED IN BONE MARROW, SIGNAL =   1; EXPRESSED IN BRAIN, SIGNAL =   1; EXPRESSED IN HELA, SIGNAL = 2.1
MTIIVTTSTTFTTTVTTTTTIATITTTITTTITTTTTTITTTTTITIAITTTTFTTTTTITTTITTTTATTTITTIITTTITTTTTPTTITTIITITTTTTFTTIITITTTITTTTTTFTTIITITTTITTTTTITTTTTIITTTITTTTMTTITTIPSTTTITIIATIVTITTTITTTIPHKHSVAPFEAKR

SEQ ID NO: 33001 - protein, 402 aa, Homo sapiens
  MAP TO U34879.1; EXPRESSED IN HELA, SIGNAL = 0.74; EXPRESSED IN BRAIN, SIGNAL = 0.93; EXPRESSED IN HEART, SIGNAL = 1.9; EXPRESSED IN BONE MARROW, SIGNAL = 1.6; SWISSPROT HIT: P54802, EVALUE 0.00e+00
DTEAVWLLQGWLFQHQPQFWGPAQIRAVLGAVPRGRLLVLDLFAESQPVYTRTASFQGQPFIWCMLHNFGGNHGLFGALEAVNGGPEAARLFPNSTMVGTGMAPEGISQNEVVYSLMAELGWRKDPVPDLAAWVTSFAARRYGVSHPDAGAAWRLLLRSVYNCSGEACRGHNRSPLVRRPSLQMNTSIWYNRSDVFEAWRLLLTSAPSLATSPAFRYDLLDLTRQAVQELVSLYYEEARSAYLSKELASLLRAGGVLAYELLPALDEVLASDSRFLLGSWLEQARAAAVSEAEADFYEQNSRYQLTLWGPEGNILDYANKQLAGLVANYYTPRWRLFLEALVDSVAQGIPFQQHQFDKNVFQLEQAFVLSKQRYPSQPRGDTVDLAKKIFLKYYPGWVAGSW

SEQ ID NO: 33002 - protein, 79 aa, Homo sapiens
  MAP TO U34879.1; EXPRESSED IN HELA, SIGNAL = 0.74; EXPRESSED IN BRAIN, SIGNAL = 0.93; EXPRESSED IN HEART, SIGNAL = 1.9; EXPRESSED IN BONE MARROW, SIGNAL = 1.6
WILRLCGCSKAGSSSTSRSSGGPPRSGLCWELCPVAASWFWTCLLRASLCIPALPPSRASPSSGACCTTLGETMVFLEP

SEQ ID NO: 33003 - protein, 252 aa, Homo sapiens
  MAP TO AC004797.1; EXPRESSED IN HELA, SIGNAL = 0.48; EXPRESSED IN BONE MARROW, SIGNAL =   4; SWISSPROT HIT: O28142, EVALUE 3.10e-01
DGRMAAQGAPRFLLTFDFDETIVDENSDDSIVRAAPGQRLPESLRATYREGFYNEYMQRVFKYLGEQGVRPRDLSAIYEAIPLSPGMSDLLQFVAKQGACFEVILISDANTFGVESSLRAAGHHSLFRRILSNPSGPDARGLLALRPFHTHSCARCPANMCKHKVLSDYLRERAHDGVHFERLFYVGDGANDFCPMGLLAGGDVAFPRRGYPMHRLIQEAQKAEPSSFRASVVPWETAADVRLHLQQVLKSC

SEQ ID NO: 33004 - protein, 65 aa, Homo sapiens
  MAP TO AF024533.1; EXPRESSED IN HELA, SIGNAL = 1.1; EXPRESSED IN BONE MARROW, SIGNAL = 0.74
MLFKFAAFFLRRGLSRESRAPAASGRPKRLCSELGLRGALLLLLLLGGGAELGAAGPSPGAAAAE

SEQ ID NO: 33005 - protein, 35 aa, Homo sapiens
  MAP TO AF024533.1; EXPRESSED IN HELA, SIGNAL = 1.1; EXPRESSED IN BONE MARROW, SIGNAL = 0.74
TWAPRCRRCLGPQWPPRRRSCRPPSWAPPGRCGPR

SEQ ID NO: 33006 - protein, 198 aa, Homo sapiens
  MAP TO AF024533.1; EXPRESSED IN HELA, SIGNAL = 1.1; EXPRESSED IN BONE MARROW, SIGNAL = 0.74; SWISSPROT HIT: P23246, EVALUE 1.80e-01
APWPMAILPCGPQGGKCAKRSRGPGRGLGLGRGVGGGRRVGPGRRVGLGRGLGSGPRVGAGRGPWRGSGLRAQVRPGVGAGRGPSPGHGVAAPAPSDPVQALAAQPGCPPQGRSPSELPFDRFLPAGGLLQAVDDAVQVRGLLLAQGVVARVPGARGLGEAEKALQRAGPAGGAAAAAVAGRWRGARGRGALPRRGGG

SEQ ID NO: 33007 - protein, 208 aa, Homo sapiens
  MAP TO AD000684.1; EXPRESSED IN BONE MARROW, SIGNAL = 1.1; EXPRESSED IN HELA, SIGNAL = 0.79; SWISSPROT HIT: P34995, EVALUE 3.50e+00
MSEVTSLHEDDWRSRPSRGPALTPIRDEEWGGHSPRSPRGWDQEPAREQAGGGWRARRPRARSVDALDDLTPPSTAESGSRSPTSNGGRSRAYMPPRSRSRDDLYDQDDSRDFPRSRDPHYDDFRSRERPPADPRSHHHRTRDPRDNGSRSGDLPYDGRLLEEAVRKKGSEERRRPHKEEEEEAYYPPAPPPYSETDSQASRERRLKK

SEQ ID NO: 33008 - protein, 64 aa, Homo sapiens
  MAP TO AD000684.1; EXPRESSED IN BONE MARROW, SIGNAL = 1.1; EXPRESSED IN HELA, SIGNAL = 0.79
GTTSMTKTTRGTSHAPGTPTTTTSGLGSALLPTPGPTTTVPGTLGTTAPGPGTSPMMGGYWRRL

SEQ ID NO: 33009 - protein, 213 aa, Homo sapiens
  MAP TO AP000114.1; EXPRESSED IN HELA, SIGNAL =   2; EXPRESSED IN BRAIN, SIGNAL = 2.2; EXPRESSED IN BONE MARROW, SIGNAL = 1.8; SWISSPROT HIT: P18583, EVALUE 1.00e-108
IMSSHVMKGINLSSGDQNLAPEIGMQEIALHSGEEPHAEEHLKGDFYESEHGINIDLNINNHLIAKEMEHNTVCAAGTSPVGEIGEEKILPTSETKQRTVLDTYPGVSEADAGETLSSTGPFALEPDATGTSKGIEFTTASTLSLVNKYDVDLSLTTQDTEHDMVISTSPSGGSEADIEGPLPAKDIHLDLPSNNNLVSKDTEEPLPVKESDQ

SEQ ID NO: 33010 - protein, 1166 aa, Homo sapiens
  MAP TO U82670.2; EXPRESSED IN HEART, SIGNAL = 1.4; EXPRESSED IN BONE MARROW, SIGNAL = 1.1; SWISSPROT HIT: P24856, EVALUE 5.00e-20
SKATAPAPGALCSERSRARRSIAPTPCLLCGDRSWVGMGIAPTPGALLGGKSRKCRAIAITPGALRGGRSQKRRVVAPTPEALHGDGSWTYMAIAPTPGALHGDSSPAHTSIIPSPGALHGDGPPAHMAFPSTPGTLHGDASHAHMAIAPTPGTMRGDSSTARTATAPSPGALRGDRSWKRKAIASTPGALHGNRSDRSRKCKAIASTPGTLHVERSPALRAIVPTPGTLGRDSSPGRTSIIPSPGALHGDRSPAHLDIASTPGALHGDSSQAHTAIAPTPGTMRGDSSTARMAIAPSAGALRGDRSWKRKAIASTPGALRGNRSDRSRKRKAIASTPGALLGNRSDRSRKRKAIAPTPGAPRIDRSPACRAIAPTPGALGDDSSTAIAPTPGTPRGDSSPANTAIASTPGALHGDTSQTHKAIAPTPGDLGGGSSSAHKAIAPSPGALHGDRSPAHTAIASTPGALHGDSSQVHTTIAPTPGALRDDKSWKRKAIAPTPGTLHCDSSRTCTAFAPTPGALHADRSPAHQDITLTSGALHCDSSRESRAVAPILGALHRVGSQAHKAIASTPGPLRGDSSPFHTAIAPMPGALHGTRSWKREAISQTPGTLCGDSSGERMAIAPTPGALHSDRSQTHTAIDPTPSVLRSDSSPACMAIDPTPGALGRDRSQALMAIAPTPVGMQAHVLQSPRACQDSLTLSRHVCEKKGKKRANASTLMSLPPTVTEEGASLPPGLTSPAPPALKEETQDSRPKKALAASPESSPFSGNIQDPGEGAWKPGWAGMAASSGSRQHRLPSSLRLANRKRKRPGPDFQRRPQGPQTPGDAKLANPVTTIQRAGGKQDGQPPSLAFPQEPHPIERGTMVWFKFQDHPFWPAVVKSVSNTDKTARVLLLEANLHHGKRGIQVPLRRLKHLDCKEKEKLLKRAQKAYKQSVNWCFSLISHYREGLVRGSFRGSFLDYYAADISYPIRRAIQEGDLQIDFPKVNYGDLEDWEEETSLGGKRPCKKILPDRMRASWDRDNQKLVDFIVRRKGADPHLLDILQGRKQSRWLTAFLKPHRDLHCIETYLEDDDQLEVVAKHLQEIYKQIDKARLTLIRDDKVNFVLEVLLPEAMICTIAALDGLDYKAAEEKYLRGPPVHYREKELFDRNILKKARREPATTHTAN

SEQ ID NO: 33011 - protein, 225 aa, Homo sapiens
  MAP TO AC005618.1; EXPRESSED IN HEART, SIGNAL = 1.2; EXPRESSED IN BONE MARROW, SIGNAL = 0.88; EXPRESSED IN FETAL LIVER, SIGNAL = 1.1; EXPRESSED IN HELA, SIGNAL = 0.56; SWISSPROT HIT: Q9Y5E2, EVALUE 4.00e-54
VLSEPIRYAIPEELDRGSLVGNLAKDLGFGVGDLPTRNLRVIAEKKFFTVSPENGNLLVSDRIDREEICGKKSTCVLEFEMVAEKPLNFFHVTVLIQDINDNPPTFSQNITELEISELALTGATFALESAQDPDVGVNSLQQYYLSPDPHFSLIQKENLDGSRYPELVLKAPLDREEQPHHHLVLTAVDGGEPSRSCTTQIRVIVADANDNPPVFTQDMYRVNVA

SEQ ID NO: 33012 - protein, 60 aa, Homo sapiens
  MAP TO AC011536.5; EXPRESSED IN PLACENTA, SIGNAL = 1.5; EXPRESSED IN HELA, SIGNAL = 0.71; EXPRESSED IN BONE MARROW, SIGNAL = 0.81; SWISSPROT HIT: O88799, EVALUE 2.20e-02
MGTCVYVLAQTCGTRPGLHRFAVLQENVAWGNGRVSVTRVITVQVANFTLRLEQRQWKVT

SEQ ID NO: 33013 - protein, 193 aa, Homo sapiens
  MAP TO AC011536.5; EXPRESSED IN PLACENTA, SIGNAL = 1.5; EXPRESSED IN HELA, SIGNAL = 0.71; EXPRESSED IN BONE MARROW, SIGNAL = 0.81
PPKTATQTPTWLMPTLSPQPSSALPTATTSSAVTPVLGAARACRHPRAVSRPAVKAVSAMLASCSVVTRVYLWASVAASTMTATTHWARPSTLALGVIPFAAAGRAVRCPVSPPAAARMRPAGHPVAAWAAWPWALPPARRREIPTTPPSMATASTSWAPACMCWLRPAAPGLACIGLPSCRRTWPGVMGESV

SEQ ID NO: 33014 - protein, 251 aa, Homo sapiens
  MAP TO AC005678.1; EXPRESSED IN HEART, SIGNAL = 1.4; EXPRESSED IN BONE MARROW, SIGNAL = 1.1; EXPRESSED IN FETAL LIVER, SIGNAL = 1.1; EXPRESSED IN HELA, SIGNAL = 1.6; SWISSPROT HIT: Q15776, EVALUE 4.00e-72
DEKQTKSRDLPPAEELPEKEHGKISCHLREDIAQIPTCAEAGEQEGRLQRKQKNATGGRRHICHECGKSFAQSSGLSKHRRIHTGEKPYECEECGKAFIGSSALVIHQRVHTGEKPYECEECGKAFSHSSDLIKHQRTHTGEKPYECDDCGKTFSQSCSLLEHHRIHTGEKPYQCSMCGKAFRRSSHLLRHQRIHTGDKNVQEPEQGEAWKSRMESQLENVETPMSYKCNECERSFTQNTGLIEHQKIHTG

SEQ ID NO: 33015 - protein, 27 aa, Homo sapiens
  MAP TO AC005678.1; EXPRESSED IN HEART, SIGNAL = 1.4; EXPRESSED IN BONE MARROW, SIGNAL = 1.1; EXPRESSED IN FETAL LIVER, SIGNAL = 1.1; EXPRESSED IN HELA, SIGNAL = 1.6
MKNRLRAGTCLQLRSFQKRSMGRYRAT

SEQ ID NO: 33016 - protein, 218 aa, Homo sapiens
  MAP TO AC005670.1; EXPRESSED IN HELA, SIGNAL = 0.77; EXPRESSED IN BONE MARROW, SIGNAL = 0.85; SWISSPROT HIT: O60309, EVALUE 1.00e-107
AEPSAEVGNSLVHQQATAQLSGSGNDVEPPTIQHGGPHLLPESSEEAGPLAVQQETSFQSPEPINNENPSPTQQEAAAEHPQTAEEGESSLTHQEAPAQTPEFPNVVVAQPPEHSPLTQAAVQPLDLGFTITPESMTEVELSPTMKETPTQPPKKVVPQLRIYQGVTNPTPGQDQAQHPVSPSVTVQLLDLGLTITPEPTTEVGHSTPPKRTIVSPKH

SEQ ID NO: 33017 - protein, 97 aa, Homo sapiens
  MAP TO AP001101.1; EXPRESSED IN HEART, SIGNAL = 9.4; EXPRESSED IN LUNG, SIGNAL =   6; EXPRESSED IN BONE MARROW, SIGNAL = 1.3; EXPRESSED IN PLACENTA, SIGNAL = 4.9; EXPRESSED IN HELA, SIGNAL = 0.67
GRVWAWCSTATRAPLRPSSWTTNVSTPCRASRRLSRTSSGLRAAPGHPQPSSLPTTASSRRAGARRHVCLRWSSRTGATTLGTMTSTCGRCATATSQ

SEQ ID NO: 33018 - protein, 150 aa, Homo sapiens
  MAP TO AP001101.1; EXPRESSED IN HEART, SIGNAL = 9.4; EXPRESSED IN LUNG, SIGNAL =   6; EXPRESSED IN BONE MARROW, SIGNAL = 1.3; EXPRESSED IN PLACENTA, SIGNAL = 4.9; EXPRESSED IN HELA, SIGNAL = 0.67; SWISSPROT HIT: P12110, EVALUE 8.00e-83
TRVGVVQYSHEGTFEAIQLDDERIDSLSSFKEAVKNLEWIAGGTWTPSALKFAYDRLIKESRRQKTRVFAVVITDGRHDPRDDDLNLRALCDRDVTVTAIGIGDMFHEKHESENLYSIACDKPQQVRNMTLFSDLVAEKFIDDMEDVLCP

SEQ ID NO: 33019 - protein, 254 aa, Homo sapiens
  MAP TO AC025249.2; EXPRESSED IN BONE MARROW, SIGNAL = 0.84; EXPRESSED IN HELA, SIGNAL = 0.86; EXPRESSED IN BRAIN, SIGNAL = 0.91; SWISSPROT HIT: Q9H344, EVALUE 6.00e-71
MYYFLSMLSATDLGLSISTLVTMLSIFWFNVREISFNACLSHMFFIKFFTVMESSVLLAMAFDRFVAVSNPLRYAMILTDSRIAQIGVASVIRGLLMLTPMVALLIRLSYCHSQVLHHSYCYHPDVMKLSCTDTRINSAVGLTAMFSTVGVDLLLILLSYVLIIRTVLSVASPEERKETFSTCVSHIVAFAIYYIPLISLSIVHRFGKQAPAYVHTMIANTYLLISPLMNPVIYSVKTKQIRRAVIKILHSKET

SEQ ID NO: 33020 - protein, 32 aa, Homo sapiens
  MAP TO AC025249.2; EXPRESSED IN BONE MARROW, SIGNAL = 0.84; EXPRESSED IN HELA, SIGNAL = 0.86; EXPRESSED IN BRAIN, SIGNAL = 0.91; SWISSPROT HIT: Q62059, EVALUE 8.60e+00
ISPPLPSFSCSLVFLGWKPSTPGSPFPSASSL

SEQ ID NO: 33021 - protein, 50 aa, Homo sapiens
  MAP TO AC002053.2; EXPRESSED IN BONE MARROW, SIGNAL = 6.6; EXPRESSED IN LUNG, SIGNAL = 7.4; EXPRESSED IN HELA, SIGNAL = 1.5; EXPRESSED IN PLACENTA, SIGNAL = 5.7; EXPRESSED IN BRAIN, SIGNAL = 4.8
EQVSISGGALEKLLNKASELLFFLFLAESSSESEMGGLLLGAFLSCPLVM

SEQ ID NO: 33022 - protein, 47 aa, Homo sapiens
  MAP TO AC002053.2; EXPRESSED IN BONE MARROW, SIGNAL = 6.6; EXPRESSED IN LUNG, SIGNAL = 7.4; EXPRESSED IN HELA, SIGNAL = 1.5; EXPRESSED IN PLACENTA, SIGNAL = 5.7; EXPRESSED IN BRAIN, SIGNAL = 4.8
ALKNWYYCCCCCCYCCCYCCCCCCCCCCYCCCCCCCCCCCCCCCCCC

SEQ ID NO: 33023 - protein, 257 aa, Homo sapiens
  MAP TO AL163282.2; EXPRESSED IN HELA, SIGNAL =   1; EXPRESSED IN BONE MARROW, SIGNAL = 0.86; EXPRESSED IN FETAL LIVER, SIGNAL = 1.2
GVTELAMVLKPGQRPVSHHGQEGGTRETVDRTEAPEKLWTAEANRETVDRREVPEKLWTGGASRETVDRTGHQRNRGQEGVTRETVDRGGLPEKPWTGGGYQRNRGRGGYQRNRGRGGVPEKPWTGGGYQRNRGRGGLPEKPWTERATRETVDRRGLPEKPWTGGVTRETVDRTGHQRNRGQEGVTRETVDGGGYQRNRGQNGPPEKPWTGGGYQRNRGQEGATRETVDGGGYQRNRGQERQQENLRTGDGPHRNRL

SEQ ID NO: 33024 - protein, 345 aa, Homo sapiens
  MAP TO AC008468.4; EXPRESSED IN BRAIN, SIGNAL = 1.8; EXPRESSED IN HELA, SIGNAL = 0.56; EXPRESSED IN BONE MARROW, SIGNAL = 1.1; EXPRESSED IN FETAL LIVER, SIGNAL = 0.93; EXPRESSED IN HEART, SIGNAL = 1.3; SWISSPROT HIT: Q9Y5H5, EVALUE 0.00e+00
AFAQSEYTVFVKENNPPGCHIFTVSARDADAQENALVSYSLVERRLGERSLSSYVSVHAESGKVYALQPLDHEELELLQFQVSARDAGVPPLGSNVTLQVFVLDENDNAPALLTPRMRGTDGAVSEMVLRSVGAGVVVGKVRAVDADSGYNAWLSYELQPETASASIPFRVGLYTGEISTTRALDETDAPRQRLLVLVKDHGEPALTATATVLVSLVESGQAPKSSSRASVGATGPEVTLVDVNVYLIIAICAVSSLLVLTLLLYTVLRCSAMPTEGECAPGKPTLVCSSAVGSWSYSQQRRQRVCSGEGPQKTDLMAFSPGLSPCAGSTERTGEPSASSDSTGK

SEQ ID NO: 33025 - protein, 232 aa, Homo sapiens
  MAP TO AL132656.3; EXPRESSED IN BRAIN, SIGNAL = 1.7; EXPRESSED IN LUNG, SIGNAL = 1.4; EXPRESSED IN HEART, SIGNAL = 1.6; EXPRESSED IN BONE MARROW, SIGNAL = 1.5; EXPRESSED IN FETAL LIVER, SIGNAL = 1.3; SWISSPROT HIT: P15941, EVALUE 1.30e-01
  unsure 195
YPVLGPGVTANPGTSLSVFTALPFTTPAPGPAHGPLLVTAGAPPGGPLVLSTFPSTPLVTEQDGCGPSGAGASNVFVQMRTEVGPVKAAQAQTLVLTQAPLVWQAPGALCGGVVCPPPLLLAAAPVVPVMAAQVVGGTQACEGGWSQGLPLPPPPPPAAQLPPIVSQGNAGPWPQGAHGESSLLSPRPRPRQMTXVTPGVSMRTFDSGSTTSPWSGGTFPRVLTPKRFRASS

SEQ ID NO: 33026 - protein, 265 aa, Homo sapiens
  MAP TO AP001714.1; EXPRESSED IN BONE MARROW, SIGNAL = 1.7; EXPRESSED IN LUNG, SIGNAL = 1.4; EXPRESSED IN HEART, SIGNAL = 1.4; EXPRESSED IN FETAL LIVER, SIGNAL = 1.8; EXPRESSED IN BRAIN, SIGNAL = 1.4; SWISSPROT HIT: P11992, EVALUE 5.90e-01
KIGNKANVNKTAKYFNIHKMDYTATNMSKLLPLATTWMISHMSTWMISHMSTWMISHISTWMISHMSTWMISHMSTWMISHISTWMISHMSTWMISHISTWMISHVNMDDFPYVNMDDFPYINMDDFPYVNMDDFPYVNMDDFPYVNMDDFPYVNMDDFPYVNMDDFPYINMDDFPYINIDDFPYVNMDDFPYVNMDDFPYVNMDDFPYVNMDDFPYINMDDFPYINMDDFPYINMDDFPYINMDDFPYVNMDDFPYVNMDDFIE

SEQ ID NO: 33027 - protein, 72 aa, Homo sapiens
  MAP TO AP001714.1; EXPRESSED IN BONE MARROW, SIGNAL = 1.7; EXPRESSED IN LUNG, SIGNAL = 1.4; EXPRESSED IN HEART, SIGNAL = 1.4; EXPRESSED IN FETAL LIVER, SIGNAL = 1.8; EXPRESSED IN BRAIN, SIGNAL = 1.4; SWISSPROT HIT: P29991, EVALUE 7.80e-01
WMISHMSTWMISHISTWMISHMSTWMISHMSTWMISHMSTWMISHMSTWMISHMSTWMISHISTWMISHIST

SEQ ID NO: 33028 - protein, 117 aa, Homo sapiens
  MAP TO AC016620.5; EXPRESSED IN BRAIN, SIGNAL = 1.2; EXPRESSED IN HELA, SIGNAL = 1.8; EXPRESSED IN BONE MARROW, SIGNAL = 1.2; EXPRESSED IN FETAL LIVER, SIGNAL = 1.1; EXPRESSED IN LUNG, SIGNAL =   1; SWISSPROT HIT: O52597, EVALUE 8.00e-06
RIHGSRNQGVEVEVAPLTITPSGPLEKFLLPVPATLRSAGLKVLGPEWRVLPPGHTTTIPLNWKLILPPGHFELLLPLSQQAKKGVTVLPGVIGLDYQDEISLLLILKSVYSSLPDG

SEQ ID NO: 33029 - protein, 18 aa, Homo sapiens
  MAP TO AC016620.5; EXPRESSED IN BRAIN, SIGNAL = 1.2; EXPRESSED IN HELA, SIGNAL = 1.8; EXPRESSED IN BONE MARROW, SIGNAL = 1.2; EXPRESSED IN FETAL LIVER, SIGNAL = 1.1; EXPRESSED IN LUNG, SIGNAL =   1
MRLPILHGMPYPPSWYSA

SEQ ID NO: 33030 - protein, 219 aa, Homo sapiens
  MAP TO Z72004.1; EXPRESSED IN BONE MARROW, SIGNAL = 1.1; EXPRESSED IN HELA, SIGNAL = 0.33; EXPRESSED IN BRAIN, SIGNAL = 1.3; SWISSPROT HIT: Q16960, EVALUE 7.80e-01
VGNWSKGHSCYALAKRLVAFCPCPRGLWNFELVRNDLGIWQKKIVKQQSIQEEAEHKILETMKPNNAIEKKNPFSGVKFKPASDICVSNKEPHVNHQDNAKMSSRHVRDLHSIPTNHRPRGLEGKDGFMSWAQGSPALCSLRTWCCVSQLFQLQLWLKESKIQLRPLLQRVQSPSLDSLHMVLDLQVHRSQELRLGTHRLDFTECMEMPVCLGRILLQV

SEQ ID NO: 33031 - protein, 281 aa, Homo sapiens
  MAP TO AL121919.19; EXPRESSED IN LUNG, SIGNAL = 2.1; EXPRESSED IN HELA, SIGNAL = 3.8; EXPRESSED IN BONE MARROW, SIGNAL = 2.3; EXPRESSED IN HEART, SIGNAL = 2.1; EXPRESSED IN FETAL LIVER, SIGNAL = 2.5; SWISSPROT HIT: Q15054, EVALUE 3.70e+00
DISPSAGEHGDCTTHSTAATSGLSLQSDTCLAVVNDVPLPPGKGLDLGLLETQLLASQDSVSTDPKPYIFSDAQRPSSFGSKGTFPHHDIATSVAAVCISLPVRTDHIAQEIHSAESRDHSQTAGRTLTSSSPDSKVTEEGRAQTLLPGRPSSGQRISDSVPLESTEKTHLEIPASGPSSASSHHKEGRHKTFFPSRGQYGCGEMTVPCPSLGSDGRKRQVSGLITRKDSVVPSKPEQPIEIPEAPSKSLKKRSLEGMRKQTRVEFSDTSSDDEDRLVIEI

SEQ ID NO: 33032 - protein, 193 aa, Homo sapiens
  MAP TO AJ239326.3; EXPRESSED IN PLACENTA, SIGNAL = 2.1; EXPRESSED IN HELA, SIGNAL = 0.41; EXPRESSED IN LUNG, SIGNAL = 2.2; EXPRESSED IN BONE MARROW, SIGNAL = 2.1; SWISSPROT HIT: P39060, EVALUE 6.00e-85
RISEEVGLLQLLGDPPPQQVTQTDDPDVGLAYVFGPDANSGQVARYHFPSLFFRDFSLLFHIRPATEGPGVLFAITDSAQAMVLLGVKLSGVQDGHQDISLLYTEPGAGQTHTAASFRLPAFVGQWTHLALSVAGGFVALYVDCEEFQRMPLARSSRGLELEPGAGLFVAQAGGADPDKFQVTPTVPSLGDWS

SEQ ID NO: 33033 - protein, 238 aa, Homo sapiens
  MAP TO AF050154.1; EXPRESSED IN HELA, SIGNAL = 0.73; EXPRESSED IN BRAIN, SIGNAL =  26; EXPRESSED IN BONE MARROW, SIGNAL = 9.2; SWISSPROT HIT: P02649, EVALUE 1.00e-112
ALMDETMKELKAYKSELEEQLTPVAEETRARLSKELQAAQARLGADMEDVCGRLVQYRGEVQAMLGQSTEELRVRLASHLRKLRKRLLRDADDLQKRLAVYQAGAREGAERGLSAIRERLGPLVEQGRVRAATVGSLAGQPLQERAQAWGERLRARMEEMGSRTRDRLDEVKEQVAEVRAKLEEQAQQIRLQAEAFQARLKSWFEPLVEDMQRQWAGLVEKVQAAVGTSAAPVPSDNH

SEQ ID NO: 33034 - protein, 84 aa, Homo sapiens
  MAP TO AF050154.1; EXPRESSED IN HELA, SIGNAL = 0.73; EXPRESSED IN BRAIN, SIGNAL =  26; EXPRESSED IN BONE MARROW, SIGNAL = 9.2
GADGRDHEGVEGLQIGTGGTTDPGGGGDAGTAVQGAAGGAGPAGRGHGGRVRPPGAVPRRGAGHARPEHRGAAGAPRLPPAQAA

SEQ ID NO: 33035 - protein, 204 aa, Homo sapiens
  MAP TO AC000403.1; EXPRESSED IN HELA, SIGNAL = 2.1; EXPRESSED IN PLACENTA, SIGNAL = 1.7; EXPRESSED IN LUNG, SIGNAL = 1.7; EXPRESSED IN HEART, SIGNAL = 1.3; EXPRESSED IN FETAL LIVER, SIGNAL = 1.6; EXPRESSED IN BONE MARROW, SIGNAL = 1.6; SWISSPROT HIT: P54987, EVALUE 6.00e-98
FHPPSVVGTLGSAAAASKFLGLSSTKCREALAIAVSHAGAPMANAATQTKPLHIGNAAKHGIEAAFLAMLGLQGNKQVLDLEAGFGAFYANYSPKVLPSIASYSWLLDQQDVAFKRFPAHLSTHWVADAAASVRKHLVAERALLPTDYIKRIVLRIPNVQYVNRPFPVSEHEARHSFQYVACAMLLDGGITVPSFHECQINRPQ

SEQ ID NO: 33036 - protein, 41 aa, Homo sapiens
  MAP TO AC000403.1; EXPRESSED IN HELA, SIGNAL = 2.1; EXPRESSED IN PLACENTA, SIGNAL = 1.7; EXPRESSED IN LUNG, SIGNAL = 1.7; EXPRESSED IN HEART, SIGNAL = 1.3; EXPRESSED IN FETAL LIVER, SIGNAL = 1.6; EXPRESSED IN BONE MARROW, SIGNAL = 1.6
PDSVTPLSMFLMTTLSCLLVVTVCTSPTLLLCFSDSIPLPW

SEQ ID NO: 33037 - protein, 55 aa, Homo sapiens
  MAP TO AF241729.1; EXPRESSED IN LUNG, SIGNAL =   2; EXPRESSED IN BONE MARROW, SIGNAL = 1.9; SWISSPROT HIT: P47805, EVALUE 4.00e-12
MMQICDTYNQKHSLFNAMNRFIGAVNNMDQTVMVPSLLRDVPLADPGLDNDVGVE

SEQ ID NO: 33038 - protein, 545 aa, Homo sapiens
  MAP TO AC002111.1; EXPRESSED IN BONE MARROW, SIGNAL = 0.85
MLLEAGRKKPMCHLPLRPLGLTTEHGHRQLLLCPLGLTTERGHHHLPLRPLRLTTEWGHRQLLLCPLGLTTERGHHHLPLRPLGLTTEHGHRQLLLCPLRLTTEWGHHHLPLRPLRLTTEWGHRQLLLCPLGLTTERGHHHLPLRPLRLTTEHGHRQLLLCPLRLTTEWGHHHLPLRPLGLTTEHGHRQLPLRPLGLTTEHGHHHLPLRPLRLTTEWGHHQLLLCPLGLTTEHGHHHLPLRPLRLTTEHGHRQLLLCPLRLTTEHGHRQLPLRPLGLTTEHGHHHLPLRPLGLTTEHGHHHLPLRPLGLTTEWGHHHLPLRPLRLTTEWGHRQLLLCPLGLTTERGHHHLPLRPLGLTTEWGHHHLPLRPLRLTTERGHRQLLLCPLGLTTERGHHHLPLRPLGLTTDHGHHHLPLRPLGLTTEHGHHHLPLRPLGLTTEHGHHHLPLRPLGLTTDHGHRQLPLRPLGLTTEWGHHHLPLRPLGLTTEHGHRRHAATFLDTQQCCPLQPAQADPRCPSTVRRNTVTAVPPSWGHSRHFDVGPVPS

SEQ ID NO: 33039 - protein, 268 aa, Homo sapiens
  MAP TO AC008488.6; EXPRESSED IN BRAIN, SIGNAL = 0.81; EXPRESSED IN BONE MARROW, SIGNAL = 1.1; SWISSPROT HIT: Q10264, EVALUE 1.00e-02
MSHKKSFFDKKRSERKWSHQDTFKCEAVNKQSFQTSQPFQVLKKKMNENLEISENSDDCQILTCPVCFRAQGCISLEALNKHVDECLDGPSISENFKMFSCSHVSATKVNKKENVPASSLCEKQDYEAHPKIKEISSVDCIALVDTIDNSSKAESIDALSNKHSKEECSSLPSKSFNIEHCHQNSSSTVSLENEDVGSFRQEYRQPYLCEVKTGQALVCPVCNVEQKTSDLTLFNVHVDVCLNKSFIQELRKDKFNPVNQPKESSRST

SEQ ID NO: 33040 - protein, 27 aa, Homo sapiens
  MAP TO AC008488.6; EXPRESSED IN BRAIN, SIGNAL = 0.81; EXPRESSED IN BONE MARROW, SIGNAL = 1.1
ILLLLFHWKTKMLDHLDKNTASLTYVK

SEQ ID NO: 33041 - protein, 287 aa, Homo sapiens
  MAP TO AC005630.1; EXPRESSED IN BONE MARROW, SIGNAL = 1.7; EXPRESSED IN FETAL LIVER, SIGNAL = 1.9; EXPRESSED IN PLACENTA, SIGNAL = 1.4; SWISSPROT HIT: Q08379, EVALUE 5.00e-10
EPLAPEPPAGPSKVEQLQDETNHLRKELESVGRQLQAEVENNQMLSLLNRRQEERLREQEERLHEQEERLHEQEERLCEQEERLREQEERLCEQEERLREQEERLHEQEERLREQEERLREQEERLHEQEERLCEQEERLREQEERLCEQEERLREQEERLCEQEERLREQEERLCEQEERLCEQEERLCEQEKLPGQERLLEEVEKLLEQERRQEEQERLLERERLLDEVEELLEQERLRQQDERLWQQETLRELERLRELERMLELGWEALYEQRAEPRSGFEEL

SEQ ID NO: 33042 - protein, 23 aa, Homo sapiens
  MAP TO AC005630.1; EXPRESSED IN BONE MARROW, SIGNAL = 1.7; EXPRESSED IN FETAL LIVER, SIGNAL = 1.9; EXPRESSED IN PLACENTA, SIGNAL = 1.4
NPWPQSPQQGHLRWSSYKMRPTT

SEQ ID NO: 33043 - protein, 311 aa, Homo sapiens
  MAP TO AL096805.1; EXPRESSED IN HELA, SIGNAL = 0.82; EXPRESSED IN BONE MARROW, SIGNAL = 0.88; SWISSPROT HIT: P51172, EVALUE 9.00e-20
LCPVPHVSAPSHVPAHPPCPQACLVSCFQQLMVETCSCGYYLHPLPAGAEYCSSARHPAWGESCSLPPTLSAISRGVTASLTHASDPSPRTLLLPPLPGPGDPPAPLYLPLPQALQVRRGCWGRGQGSLPQVAWQVTPGCLFQGVCIQALHWDLQVAFRQVSCESPKWWGGGVDSQADPTGPTEPTQDKGRAGTDPAYAPWSLPPHPPVVPRMAGGMGEPWPQQTFRLQGWTLATLGEQGLPHQSHRQRWVHPPPPERHHSPSPLKAPLPIMKVWASALMPLSCPRSSLAKINIVYQELNYRSVEEAPVYS

SEQ ID NO: 33044 - protein, 27 aa, Homo sapiens
  MAP TO AL096805.1; EXPRESSED IN HELA, SIGNAL = 0.82; EXPRESSED IN BONE MARROW, SIGNAL = 0.88
LPGVLLPAADGGDLLLWLLPPPSAGGG

SEQ ID NO: 33045 - protein, 26 aa, Homo sapiens
  MAP TO AL096805.1; EXPRESSED IN HELA, SIGNAL = 0.82; EXPRESSED IN BONE MARROW, SIGNAL = 0.88
DTASTASTRTWRPTGSPVPPAAPGPA

SEQ ID NO: 33046 - protein, 23 aa, Homo sapiens
  MAP TO AL096805.1; EXPRESSED IN HELA, SIGNAL = 0.82; EXPRESSED IN BONE MARROW, SIGNAL = 0.88
WPGAWGSRGHSKPSVCRDGLWPR

SEQ ID NO: 33047 - protein, 24 aa, Homo sapiens
  MAP TO AL096805.1; EXPRESSED IN HELA, SIGNAL = 0.82; EXPRESSED IN BONE MARROW, SIGNAL = 0.88
AAWPKSTSSTRSSTTAQWRRRPCT

SEQ ID NO: 33048 - protein, 67 aa, Homo sapiens
  MAP TO AC004174.1; EXPRESSED IN BONE MARROW, SIGNAL = 1.3; EXPRESSED IN LUNG, SIGNAL = 1.1; EXPRESSED IN BRAIN, SIGNAL =   1; EXPRESSED IN HELA, SIGNAL = 1.4
AVDDGVEDGGDHSIEEGHQRVSGRIVAGLRANIDKECGAIEEGDHDQVGGAGGEGLAAARNRWDPED

SEQ ID NO: 33049 - protein, 158 aa, Homo sapiens
  MAP TO AP000336.1; EXPRESSED IN BRAIN, SIGNAL = 0.84; EXPRESSED IN HELA, SIGNAL = 1.5; EXPRESSED IN BONE MARROW, SIGNAL =   1
RPPSSSWTHSRPLSSSSSFSTHNHPPCSSSSSSWTCSRPPSSSWTRSRPPCSSSSSWTHSRPLSSSWTCSHPPCSSSSSWTHSCPHSSSWTHSCPPSSSWTRSRPPSSWTHSRPLSSSWTCSRPPCSSSSWTHRHLPSSCWTHSHPPCSSSSPSSLLF

SEQ ID NO: 33050 - protein, 167 aa, Homo sapiens
  MAP TO AP000500.1; EXPRESSED IN BONE MARROW, SIGNAL = 0.73; EXPRESSED IN FETAL LIVER, SIGNAL =   1; EXPRESSED IN HELA, SIGNAL =   1; SWISSPROT HIT: P07801, EVALUE 1.60e+00
QDASRNLNQHEVAGHPHSWSLEMLLRRLRAVHTKQDDKFANLLDAVGEFGTFQQRLVALTFIPSIMSAFFMFADHFVFTAQKPYCNTSWILAVGPHLSKAEQLNLTIPQAPNGSFLTCFMYLPVPWNLDSIIQFGLNDTDTCQDGWIYPDAKKRSLINEVCLVMGCL

SEQ ID NO: 33051 - protein, 167 aa, Homo sapiens
  MAP TO Z49918.1; EXPRESSED IN BONE MARROW, SIGNAL = 0.85; EXPRESSED IN BRAIN, SIGNAL = 0.91; SWISSPROT HIT: P53830, EVALUE 1.10e+00
DLKSLRSQTSRGSAKLSPQSFSVRLTDQLSADQKQKSISSLTLSSCLIPHYNQEASVLQKKGHKRKHFLMENINNENKGSINLKRKHITYNNLSEKTSKQMALEEDTDDAEGYLNSGNSGALKKHFCDIRHLDDWAKSQLIEMLKQAAALVITVMYTDGSTQLGADQ

SEQ ID NO: 33052 - protein, 19 aa, Homo sapiens
  MAP TO Z49918.1; EXPRESSED IN BONE MARROW, SIGNAL = 0.85; EXPRESSED IN BRAIN, SIGNAL = 0.91
RKQVNKWHWKKILMTPKAT

SEQ ID NO: 33053 - protein, 59 aa, Homo sapiens
  MAP TO AC011493.2; EXPRESSED IN BRAIN, SIGNAL = 0.87; EXPRESSED IN HELA, SIGNAL = 1.1; EXPRESSED IN BONE MARROW, SIGNAL = 1.1; EXPRESSED IN FETAL LIVER, SIGNAL =   1; SWISSPROT HIT: P90682, EVALUE 8.00e+00
SIKAFILQRSPTNVKNVEKSLIGLQPLLIIRKFILKKNPTNVKNIEKLLVYPQILLHIR

SEQ ID NO: 33054 - protein, 26 aa, Homo sapiens
  MAP TO AC011553.3; EXPRESSED IN HELA, SIGNAL =   1; EXPRESSED IN BRAIN, SIGNAL = 0.8; EXPRESSED IN FETAL LIVER, SIGNAL = 1.1; EXPRESSED IN BONE MARROW, SIGNAL =   1; EXPRESSED IN LUNG, SIGNAL = 0.96
RRRRKRRRRRRRNRRRRRRNRRRRRN

SEQ ID NO: 33055 - protein, 208 aa, Homo sapiens
  MAP TO AC011553.3; EXPRESSED IN HELA, SIGNAL =   1; EXPRESSED IN BRAIN, SIGNAL = 0.8; EXPRESSED IN FETAL LIVER, SIGNAL = 1.1; EXPRESSED IN BONE MARROW, SIGNAL =   1; EXPRESSED IN LUNG, SIGNAL = 0.96
ETAGGGGRGGEGGGGTGGGGGGTGGGGGIGGGGGGGTGGGGGGGTGGGGGTGGGGGGTGGGGGGGTGGGGGGTAGGGGTGGGGGSTGGGGGTGGGGGTGGGGGTGGGGGTGGGGGGGTGGGGGGTGGGGGGTGGGGGTGGGGGGGSGGTVGLPQGVPGGGQDSTALKQTRRPARARVTRPTGRIQQPLRSSPRHAREDPELSVALPDI

SEQ ID NO: 33056 - protein, 240 aa, Homo sapiens
  MAP TO AL137185.3; EXPRESSED IN LUNG, SIGNAL = 1.3; EXPRESSED IN HELA, SIGNAL = 2.1; EXPRESSED IN BONE MARROW, SIGNAL = 1.3; SWISSPROT HIT: Q9Y6L6, EVALUE 4.10e+00
VKGQAMIATGGVITGLAALKRQDSARSQQHVNLSPSPATQEKKPIRRRPRADVVVVRGKIRLYSPSGFFLILGVLISIIGIAMAVLGYWPQKEHFIDAETTLSTNETQVIRNEGGVVVRFFEQHLHSDKMKMLGPFTMGIGIFIFICANAILHENRDKETKIIHMRDIYSTVIDIHTLRIKEQRQMNGMYTGLMGETEVKQNGSSCASRLAANTIASFSGFRSSFRMDSSVEEDELMLNE

SEQ ID NO: 33057 - protein, 50 aa, Homo sapiens
  MAP TO AL137185.3; EXPRESSED IN LUNG, SIGNAL = 1.3; EXPRESSED IN HELA, SIGNAL = 2.1; EXPRESSED IN BONE MARROW, SIGNAL = 1.3
ELLWPFLDIGPKKNILLMLKQHCQQMKLRSFGMKAVWWFASLSSICILIR

SEQ ID NO: 33058 - protein, 20 aa, Homo sapiens
  MAP TO AL163636.2; EXPRESSED IN HELA, SIGNAL = 0.36; EXPRESSED IN BONE MARROW, SIGNAL = 0.94; EXPRESSED IN FETAL LIVER, SIGNAL = 0.97
WCCRPVSRPSFMGSWTLSQG

SEQ ID NO: 33059 - protein, 189 aa, Homo sapiens
  MAP TO AL163636.2; EXPRESSED IN HELA, SIGNAL = 0.36; EXPRESSED IN BONE MARROW, SIGNAL = 0.94; EXPRESSED IN FETAL LIVER, SIGNAL = 0.97; SWISSPROT HIT: P44689, EVALUE 4.10e+00
KQQRISTWQMVLSTSVKTKFHGFLDAQPGVVSEGPPGNWEQKPVSRHLLSVEAVLSRLLPVGVQLRKERGSQARSLPGLPLRPLGRVLLRRQLQGRIQAGGASSEKRGAVPTTQRLARRPSTPHHAPISVRVHTLTQGRQPHLDAKQDSKEHLCVFYRLPIIVLGRKKRVRNKTSFHCPARFCGLVLRP

SEQ ID NO: 33060 - protein, 1204 aa, Homo sapiens
  MAP TO AC003973.1; EXPRESSED IN BRAIN, SIGNAL = 4.4; EXPRESSED IN BONE MARROW, SIGNAL = 3.2; EXPRESSED IN HEART, SIGNAL = 1.3; EXPRESSED IN PLACENTA, SIGNAL = 3.7; SWISSPROT HIT: O43345, EVALUE 0.00e+00
ICSHFAQDLWPEQGIEDSFQKVILRRYEKCGHENLHLKIGYTNVDECKVHKEGYNKLNQSLTTTQSKVFQRGKYANVFHKCSNSNRHKIRHTGKKHLQCKEYVRSFCMLSHLSQHKRIYTRENSYKCEEGGKAFNWSSTLTYYKSAHTGEKPYRCKECGKAFSKFSILTKHKVIHTGEKSYKCEECGKAFNQSAILTKHKIIHTGEKPNKCEECGKAFSKVSTLTTHKAIHAGEKPYKCKECGKAFSKVSTLITHKAIHAGEKPYKCKECGKAFSKFSILTKHKVIHTGEKPYKCEECGKAYKWPSTLSYHKKIHTGEKPYKCEECGKGFSMFSILTKHEVIHTGEKPYKCEECGKAFNWSSNLMEHKKIHTGETPYKCEECGKGFSMFSILTKHKVIHNGEKPYKCEECDKATHAGEKPYKCEECGKAFNWSSNLMEHKRIHTGEKPYKCEECGKSFSTFSILTKHKVIHTGEKPYKCEECGKAYKWSSTLSYHKKIHTVEKPYKCEECGKAFNQSAILIKHKRIHTGEKPYKCEECGKTFSKVSTLTTHKAIHAGEKPYKCKECGKTFIKVSTLTTHKAIHAGEKPYKCKECGKAFSKFSILTKHKVIHTGEKPYKCEECGKAFNWSSNLMEHKRIHTGEKPYKCEECGKSFSTFSVLTKHKVIHTGEKPYKCEECGKAYKWSSTLSYHKKIHTVEKPYKCEECGKAFNRSAILIKHKRIHTDEKPYKCEECGKTFSKVSTLTTHKAIHAGEKPYKCKECGKAFSKFSILTKHKVIHTGEKPYKCEECGKAYKWPSTLSYHKKIHTGEKPYKCEECGKGFSMFSILTKHEVIHTGEKPYKCEECGKAFSWLSVFSKHKKTHAGEKFYKCEACGKAYKSSSTLSYHKKIHTEEKPYKYEECGKGFSTFSILTKHKVIHTGEKPYKCEECGKAFNWSSNLMEHKKIHTGETPYKCEECDKAFSWPSSLTEHKATHAGEKPYKCEECGKAFSWPSRLTEHKATHAGEEPYKCEECGKAFNWSSNLMEHKRIHTGEKPYKCEECGKSFSTFSILTKHKVIHTGEKPYKCEECGKAYKWSSTLSYHKKIHTVEKPYKCEECGKGFVMFSILAKHKVIHTGEKLYKCEECGKAYKWPSTLRYHKKIHTGEKPYKCEECGKAFSTFSILTKHKVIHTGEKPYKCEECGKAFSWLSVFSKHKKIHTGEKL

SEQ ID NO: 33061 - protein, 276 aa, Homo sapiens
  MAP TO AC004687.1; EXPRESSED IN LUNG, SIGNAL =   1; EXPRESSED IN BONE MARROW, SIGNAL = 0.77; EXPRESSED IN HELA, SIGNAL = 0.79; EXPRESSED IN BRAIN, SIGNAL = 1.6; SWISSPROT HIT: P11276, EVALUE 2.00e-04
ELMDGRRGLVPSNFVERVSDDDLLTSLPPELADLSHSSGPELSFLSVGGGGSSSGGQSSVGRSQPRPEEEDAGDELSLSPSPEGLGEPPAVPYPRRLVVLKQLAHSVVLAWEPPPEQVELHGFHICVNGELRQALGPGAPPKAVLENLDLWAGPLHISVQALTSRGSSDPLRCCLAVGARAGVVPSQLRVHRLTATSAEITWVPGNSNLAHAIYLNGEECPPASPSTYWATFCHLRPGTPYQAQVEAQLPPQGPWEPGWERLEQRAATLQFTTLPA

SEQ ID NO: 33062 - protein, 279 aa, Homo sapiens
  MAP TO AL139423.2; EXPRESSED IN BRAIN, SIGNAL =   1; EXPRESSED IN HELA, SIGNAL = 1.1; EXPRESSED IN LUNG, SIGNAL = 1.1; EXPRESSED IN BONE MARROW, SIGNAL =   1; EXPRESSED IN FETAL LIVER, SIGNAL =   1; SWISSPROT HIT: P08775, EVALUE 1.10e-02
KGQGAWEQPGRERQQRCLLHSPQHPILSPQHPIHTPQHPIRPPQHPIHTPQHPIRTSQHPIRTPQHPIRSPQHPIRTPQHPIRTPQHPIRSLQHPIHTPEHPIRSPQHPIRSPQHPIHTPQHPIHTHSTQSTPHSIQSAPTAPNPLPAAPNPLPAAPNPHPRAPNPLPTAPNPLPTAPNPHPTAPNPLPTAPNPLPTAPNPHPTAPNPQPTAPNPHPTAPNPHPTAPNPHPQHPIHTPQHPIRSPQHPIHNPQHPIRSPQHPICSPQHPIHTHSTQSPP

SEQ ID NO: 33063 - protein, 254 aa, Homo sapiens
  MAP TO AC006313.1; EXPRESSED IN HELA, SIGNAL = 1.2; EXPRESSED IN BRAIN, SIGNAL = 0.9; EXPRESSED IN LUNG, SIGNAL = 0.99; EXPRESSED IN BONE MARROW, SIGNAL =   1; SWISSPROT HIT: P23266, EVALUE 5.00e-82
SSSTSGFILLGLSSNPKLQKPLFAIFLIMYLLTAVGNVLIILAIYSDPRLHTPMYFFLSNLSFMDICFTTVIVPKMLVNFLSETKIISYVGCLIQMYFFMAFGNTDSYLLASMAIDRLVAICNPLHYDVVMKPWHCLLMLLGSCSISHLHSLFRVLLMSRLSFCASHIIKHFFCDTQPVLKLSCSDTSSSQMVVMTETLAVIVTPFLCTIFSYLQIIVTVLRIPSAAGKWKAFSTCGSHLTVVVLFYGSVIYVY

SEQ ID NO: 33064 - protein, 39 aa, Homo sapiens
  MAP TO AC007238.3; EXPRESSED IN PLACENTA, SIGNAL = 1.5; EXPRESSED IN BRAIN, SIGNAL = 1.1; EXPRESSED IN HELA, SIGNAL = 1.5; EXPRESSED IN BONE MARROW, SIGNAL = 1.2; EXPRESSED IN FETAL LIVER, SIGNAL = 1.5; EXPRESSED IN LUNG, SIGNAL = 1.4; EXPRESSED IN HEART, SIGNAL = 1.3
RSEIVSRSPTLWPLMATMWMILTPSTNQNSPMKTSGNFS

SEQ ID NO: 33065 - protein, 381 aa, Homo sapiens
  MAP TO AC005146.1; EXPRESSED IN BRAIN, SIGNAL = 1.7; EXPRESSED IN BONE MARROW, SIGNAL = 0.79; SWISSPROT HIT: P40345, EVALUE 3.20e+00
EAIVSSWILFSDGSVTPLDIYDPKDYSVTVSSLDEMVVSVQANLESKWPIVVAEGEGQGPLIKLEMMISEPCQKTKRKSVLAVGKGNVKVKFEPSSDEHQGGSNDIEGINREYKDHLSNSIEREGNQERAVQEWFHRGTPVGQEESTNKSTTPQSPMEGKNKLLKSGGPDAFTSFPTQGKSPDPNNPSDLTVTSRGLTDLEIGMYALLCVFCLAILVFLINCVAFAWKYRHKRFAVSEQGNIPHSHDWVWLGNEVELLENPVDITLPSEECTTMIDRGLQFEERNFLLNGSSQKTFHSQLLRPSDYVYEKEIKNEPMNSSGPKRKRVKFTSYTTILPEDGGPYTNSILFDSDDNIKWVCQDMGLGDSQDFRDYMESLQDQM

SEQ ID NO: 33066 - protein, 284 aa, Homo sapiens
  MAP TO AC002110.1; EXPRESSED IN BONE MARROW, SIGNAL = 0.87; EXPRESSED IN HELA, SIGNAL = 0.51
MGARTGAKWPWGSSRRLDPGARTGAKWPGSGSGKRRRPARGRCPGPTQLPPAPRAPAPRPSRALQPRPGPAQRPRPLFHRRPARRREAQGCDPRRAHPARQAPWEMRGHSQGPAERAQRRSLPHPRPRRPRNRRTRAVPAGGGGATQAEGTLANFAPPEVASRRPGAHPPAARPRPGARPPQPGRLGRRRCDLRVQSARRAARTPPPRGPPARRALTWDICGRKLMSLRSMEPGERLCSSWHRRTPSRSACARSKTTAEGHTTRWLGGRTLQSMSQRPHCRHCS

SEQ ID NO: 33067 - protein, 228 aa, Homo sapiens
  MAP TO AP001725.1; EXPRESSED IN PLACENTA, SIGNAL = 1.8; EXPRESSED IN BONE MARROW, SIGNAL = 1.2; EXPRESSED IN FETAL LIVER, SIGNAL = 1.1; EXPRESSED IN LUNG, SIGNAL =   1; SWISSPROT HIT: Q9Y3R5, EVALUE 1.00e-114
SPVKGENGKIILETKAVIPGDEDASFPPLKSEDSGIGLSASSPELSEHLRVPRVSLERDDVWKKGGSMQRTFLCIQELIANFASKNIFGVQLTASGEESKSEEPAGKRDRDGTQSLAANDSSRKNSWEPKPITVPQFKQMLSDLFTARGSPFKTKSSESPSSSPSSPARKNGGEWDVEKVVIDLGGSREERREAFAAACHLLLDCATFPVYLSEEETEQLCATLFQLP

SEQ ID NO: 33068 - protein, 63 aa, Homo sapiens
  MAP TO AP001725.1; EXPRESSED IN PLACENTA, SIGNAL = 1.8; EXPRESSED IN BONE MARROW, SIGNAL = 1.2; EXPRESSED IN FETAL LIVER, SIGNAL = 1.1; EXPRESSED IN LUNG, SIGNAL =   1; SWISSPROT HIT: P21908, EVALUE 3.30e+00
ALPGKTGENGMLRRWSLTWGVPGRNAGRPLPPPATCCWIVPLSLSTCPRKRPSSSVQRSSSCQ

SEQ ID NO: 33069 - protein, 277 aa, Homo sapiens
  MAP TO AC008468.4; EXPRESSED IN HELA, SIGNAL = 1.5; EXPRESSED IN LUNG, SIGNAL =   1; EXPRESSED IN BONE MARROW, SIGNAL = 0.95; SWISSPROT HIT: Q9UN74, EVALUE 0.00e+00
VNDNAPAFAQPEYTVFVKENNPPGCHIFTVSAWDADAQENALVSYSLVERRVGERALSSYVSVHAESGKVYALQPLDHEELELLQFQVTARDAGVPPLGSNVTLQVFVLDENDNAPALLAPRAGGTGGAVSELVPWSVGVGHVVAKVRAVDADSGYNAWLSYELQPGTGGARIPFRVGLYTGEISTTRALDETDAPRHRLLVLVKDHGEPALTATATVLVSLVESGQAPKASSRALVGAVGPDAALVDVNVYLIIAICAVSSLLVLTLLLYTALRCS

SEQ ID NO: 33070 - protein, 59 aa, Homo sapiens
  MAP TO AC005846.1; EXPRESSED IN HELA, SIGNAL = 2.1; EXPRESSED IN BONE MARROW, SIGNAL = 1.1; SWISSPROT HIT: P04275, EVALUE 2.00e-27
LSEAEFEVLKAFVVDMMERLRISQKWVRVAVVEYHDGSHAYIGLKDRKRPSELRRIASQ

SEQ ID NO: 33071 - protein, 282 aa, Homo sapiens
  MAP TO AC005846.1; EXPRESSED IN HELA, SIGNAL = 2.1; EXPRESSED IN BONE MARROW, SIGNAL = 1.1; SWISSPROT HIT: P04275, EVALUE 0.00e+00
GLKKKKVIVIPVGIGPHANLKQIRLIEKQAPENKAFVLSSVDELEQQRDEIVSYLCDLAPEAPPPTLPPDMAQVTVGPGLLGVSTLGPKRNSMVLDVAFVLEGSDKIGEADFNRSKEFMEEVIQRMDVGQDSIHVTVLQYSYMVTVEYPFSEAQSKGDILQRVREIRYQGGNRTNTGLALRYLSDHSFLVSQGDREQAPNLVYMVTGNPASDEIKRLPGDIQVVPIGVGPNANVQELERIGWPNAPILIQDFETLPREAPDLVLQRCCSGEGLQIPTLSPAP

SEQ ID NO: 33072 - protein, 477 aa, Homo sapiens
  MAP TO AL121932.13; EXPRESSED IN BRAIN, SIGNAL = 1.3; EXPRESSED IN HELA, SIGNAL = 1.5; EXPRESSED IN BONE MARROW, SIGNAL = 1.3; EXPRESSED IN FETAL LIVER, SIGNAL = 1.3; EXPRESSED IN LUNG, SIGNAL = 0.99; SWISSPROT HIT: O43422, EVALUE 4.00e-03
MAKQASLDFFVKKRHAFSEHSSSNKRNVNNRSYPEEGKTKRVHASFTRKYDPSYIEFGFVAVIDGEVLKPQCIICGDVLANEAMKPSKLKRHLYSKHKEISSQPKEFFERKSSELKSQPKQVFNVSHINISALRASYKVALPVAKSKTPYTIAETLVKDCIKEVCLEMLGESAAKKVAQVPLSNDTIARRIQELANDMEDQLIEQIKLAKYFSLQLDECRDIANMIILLVYVRFEHDDDIKEEFFFSASLPTNTTSSELYEAVKNYIVNKCGLEFKFCVGVCSDGAASMTGKHSEVVTQIKELAPECKTTHCFIHRESLAMKKISAELNSVLNDIVKIVNYIKSNSLNSRLFSLLCDNMEADHKQLLLHAEIRWLSRGKVLSRMFEIRNELLVFLQGKKPMWSQLFKDVNWTARLAYLSDIFSIFNDLNASMQGKNATYFSMADKVEGQKQKLEAWKNRISTDCYDMFHNLTTIINE

SEQ ID NO: 33073 - protein, 59 aa, Homo sapiens
  MAP TO AL121932.13; EXPRESSED IN BRAIN, SIGNAL = 1.3; EXPRESSED IN HELA, SIGNAL = 1.5; EXPRESSED IN BONE MARROW, SIGNAL = 1.3; EXPRESSED IN FETAL LIVER, SIGNAL = 1.3; EXPRESSED IN LUNG, SIGNAL = 0.99; SWISSPROT HIT: P24970, EVALUE 8.00e+00
WRNKLHWTFLSRKDMPFLNTVVVIKEMLTIEVILKKGKPKEFMLVSLGNMILHILSLVL

SEQ ID NO: 33074 - protein, 269 aa, Homo sapiens
  MAP TO AF225898.1; EXPRESSED IN BRAIN, SIGNAL = 1.4; EXPRESSED IN HELA, SIGNAL =   2; EXPRESSED IN BONE MARROW, SIGNAL = 0.8; EXPRESSED IN LUNG, SIGNAL = 1.2; EXPRESSED IN HEART, SIGNAL = 1.3; SWISSPROT HIT: P37275, EVALUE 1.00e-115
YYALNAQPSAEELSKIADSVNLPLDVVKKWFEKMQAGQISVQSSEPSSPEPGKVNIPAKNNDQPQSANANEPQDSTVNLQSPLKMTNSPVLPVGSTTNGSRSSTPSPSPLNLSSSRNTQGYLYTAEGAQEEPQVEPLDLSLPKQQGELLERSTITSVYQNSVYSVQEEPLNLSCAKKEPQKDSCVTDSEPVVNVIPPSANPINIAIPTVTAQLPTIVAIADQNSVPCLRALAANKQTILIPQVAYTYSTTVSPAVQEPPLKVIQPNGNQ

SEQ ID NO: 33075 - protein, 653 aa, Homo sapiens
  MAP TO AC012112.1; EXPRESSED IN FETAL LIVER, SIGNAL = 2.6; EXPRESSED IN LUNG, SIGNAL = 1.5; EXPRESSED IN PLACENTA, SIGNAL = 3.6; EXPRESSED IN BRAIN, SIGNAL = 1.6; EXPRESSED IN BONE MARROW, SIGNAL = 1.6; SWISSPROT HIT: P22459, EVALUE 0.00e+00
MEVAMVSAESSGCNSHMPYGYAAQARARERERLAHSRAAAAAAVAAATAAVEGSGGSGGGSHHHHQSRGACTSHDPQSSRGSRRRRRQRSEKKKAHYRQSSFPHCSDLMPSGSEEKILRELSEEEEDEEEEEEEEEEGRFYYSEDDHGDECSYTDLLPQDEGGGGYSSVRYSDCCERVVINVSGLRFETQMKTLAQFPETLLGDPEKRTQYFDPLRNEYFFDRNRPSFDAILYYYQSGGRLKRPVNVPFDIFTEEVKFYQLGEEALLKFREDEGFVREEEDRALPENEFKKQIWLLFEYPESSSPARGIAIVSVLVILISIVIFCLETLPEFRDDRDLVMALSAGGHGGLLNDTSAPHLENSGHTIFNDPFFIVETVCIVWFSFEFVVRCFACPSQALFFKNIMNIIDIVSILPYFITLGTDLAQQQGGGNGQQQQAMSFAILRIIRLVRVFRIFKLSRHSKGLQILGHTLRASMRELGLLIFFLFIGVILFSSAVYFAEADEPTTHFQSIPDAFWWAVVTMTTVGYGDMKPITVGGKIVGSLCAIAGVLTIALPVPVIVSNFNYFYHRETENEEQTQLTQNAVSCPYLPSNLLKKFRSSTSSSLGDKSEYLEMEEGVKESLCAKEEKCQGKGDDSETDKNNCSNAKAVETDV

SEQ ID NO: 33076 - protein, 40 aa, Homo sapiens
  MAP TO AC012112.1; EXPRESSED IN FETAL LIVER, SIGNAL = 2.6; EXPRESSED IN LUNG, SIGNAL = 1.5; EXPRESSED IN PLACENTA, SIGNAL = 3.6; EXPRESSED IN BRAIN, SIGNAL = 1.6; EXPRESSED IN BONE MARROW, SIGNAL = 1.6
QQSHALWLCCPGPGPGAGEACSLQGSCSSCCCSGHSCCRR

SEQ ID NO: 33077 - protein, 126 aa, Homo sapiens
  MAP TO AL096810.1; EXPRESSED IN BRAIN, SIGNAL = 1.6; EXPRESSED IN HELA, SIGNAL = 0.53; EXPRESSED IN BONE MARROW, SIGNAL = 0.77; SWISSPROT HIT: Q9WVS8, EVALUE 3.90e-01
WPGSPAWAPSTAQPPSSPWSPVCTSWAPTCSCGATQGAGTSCAHSPRSSGGWRHPRAAVGSGQAPHPHTMPPAPPCCRTSTHSRHSCAPPPSRCSCSRPRGPSGRWRCRRATSWTWSSAACTAPSA

SEQ ID NO: 33078 - protein, 393 aa, Homo sapiens
  MAP TO AL096810.1; EXPRESSED IN BRAIN, SIGNAL = 1.6; EXPRESSED IN HELA, SIGNAL = 0.53; EXPRESSED IN BONE MARROW, SIGNAL = 0.77; SWISSPROT HIT: Q61062, EVALUE 1.60e+00
CWMAWEPSLGAFYGPAAIITLVTCVYFLGTYVQLRRHPGRRYELRTQPEEQRRLATPEGGRGIRPGTPPAHDAPGASVLQNEHSFQAQLRAAAFTLFLFTATWAFGALAVSQGHFLDMVFSCLYGAFCVTLGLFVLIHHCAKREDVWQCWWACCPPRKDAHPALDANGAALGRAACLHSPGLGQPRGFAHPPGPCKMTNLQAAQGHASCLSPATPCCAKMHCEPLTADEAHVHLQEEGAFGHDPHLHGCLQGRTKPPYFSRHPAEEPEYAYHIPSSLDGSPRSSRTDSPPSSLDGPAGTHTLACCTQGDPFPMVTQPEGSDGSPALYSCPTQPGREAALGPGHLEMLRRTQSLPFGGPSQNGLPKGKLLEGLPFGTDGTGNIRTGPWKNETTV

SEQ ID NO: 33079 - protein, 220 aa, Homo sapiens
  MAP TO AC004643.1; EXPRESSED IN BRAIN, SIGNAL = 1.5; EXPRESSED IN BONE MARROW, SIGNAL = 1.5; EXPRESSED IN FETAL LIVER, SIGNAL = 1.4; EXPRESSED IN HEART, SIGNAL = 1.5; SWISSPROT HIT: P56747, EVALUE 1.00e-92
MASAGMQILGVVLTLLGWVNGLVSCALPMWKVTAFIGNSIVVAQVVWEGLWMSCVVQSTGQMQCKVYDSLLALPQDLQAARALCVIALLVALFGLLVYLAGAKCTTCVEEKDSKARLVLTSGIVFVISGVLTLIPVCWTAHAVIRDFYNPLVAEAQKRELGASLYLGWAASGLLLLGGGLLCCTCPSGGSQGPSHYMARYSTSAPAISRGPSEYPTKNYV

SEQ ID NO: 33080 - protein, 300 aa, Homo sapiens
  MAP TO U62631.1; EXPRESSED IN HELA, SIGNAL = 1.1; EXPRESSED IN BONE MARROW, SIGNAL = 0.89; SWISSPROT HIT: O14842, EVALUE 0.00e+00
MDLPPQLSFGLYVAAFALGFPLNVLAIRGATAHARLRLTPSLVYALNLGCSDLLLTVSLPLKAVEALASGAWPLPASLCPVFAVAHFFPLYAGGGFLAALSAGRYLGAAFPLGYQAFRRPCYSWGVCAAIWALVLCHLGLVFGLEAPGGWLDHSNTSLGINTPVNGSPVCLEAWDPASAGPARFSLSLLLFFLPLAITAFCYVGCLRALARSGLTHRRKLRAAWVAGGALLTLLLCVGPYNASNVASFLYPNLGGSWRKLGLITGAWSVVLNPLVTGYLGRGPGLKTVCAARTQGGKSQK

SEQ ID NO: 33081 - protein, 45 aa, Homo sapiens
  MAP TO U62631.1; EXPRESSED IN HELA, SIGNAL = 1.1; EXPRESSED IN BONE MARROW, SIGNAL = 0.89; SWISSPROT HIT: O95180, EVALUE 4.40e-01
WTCPRSSPSASMWPPLRWASRSTSWPSEARRPTPGSVSPLAWSTP

SEQ ID NO: 33082 - protein, 83 aa, Homo sapiens
  MAP TO AC005081.2; EXPRESSED IN HEART, SIGNAL =   3; EXPRESSED IN BONE MARROW, SIGNAL = 1.7; EXPRESSED IN PLACENTA, SIGNAL = 2.3; SWISSPROT HIT: P56722, EVALUE 2.30e+00
KEWVSQAGPCPSPLRVPTLPSPGGSSFAKWGGAGEGREAGPRAQYCPHSPARGPPGAGPFRPASQSRCLRGWIPTRCRSSRSC

SEQ ID NO: 33083 - protein, 676 aa, Homo sapiens
  MAP TO AC005222.1; EXPRESSED IN HELA, SIGNAL = 0.52; EXPRESSED IN LUNG, SIGNAL =   1; EXPRESSED IN BONE MARROW, SIGNAL = 1.2; SWISSPROT HIT: P24014, EVALUE 8.00e-14
GQKMCSRVPLLLPLLLLLALGPGVQGCPSGCQCSQPQTVFCTARQGTTVPRDVPPDTVGLYVFENGITMLDAGSFAGLPGLQLLDLSQNQIASLPSGVFQPLANLSNLDLTANRLHEITNETFRGLRRLERLYLGKNRIRHIQPGAFDTLDRLLELKLQDNELRALPPLRLPRLLLLDLSHNSLLALEPGILDTANVEALRLAGLGLQQLDEGLFSRLRNLHDLDVSDNQLERVPPVIRGLRGLTRLRLAGNTRIAQLRPEDLAGLAALQELDVSNLSLQALPGDLSGLFPRLRLLAAARNPFNCVCPLSWFGPWVRESHVTLASPEETRCHFPPKNAGRLLLELDYADFGCPATTTTATVPTTRPVVREPTALSSSLAPTWLSPTEPATEAPSPPSTAPPTVGPVPQPQDCPPSTCLNGGTCHLGTRHHLACLCPEGFTGLYCESQMGQGTRPSPTPVTPRPPRSLTLGIEPVSPTSLRVGLQRYLQGSSVQLRSLRLTYRNLSGPDKRLVTLRLPASLAEYTVTQLRPNATYSVCVMPLGPGRVPEGEEACGEAHTPPAVHSNHAPVTQAREGNLPLLIAPALAAVLLAALAAVGAAYCVRRGRAMAAAAQDKGQVGPGAGPLELEGVKVPLEPGPKATEGGGEALPSGSECEVPLMGFPGPGLQSPLHAKPYI

SEQ ID NO: 33084 - protein, 106 aa, Homo sapiens
  MAP TO AC005222.1; EXPRESSED IN HELA, SIGNAL = 0.52; EXPRESSED IN LUNG, SIGNAL =   1; EXPRESSED IN BONE MARROW, SIGNAL = 1.2; SWISSPROT HIT: P13730, EVALUE 2.50e-01
CAPGSLCCCRCSCYWPWGLGCRAAHPAASAASHRQSSALPARGPRCPETCHPTRWGCTSLRTASPCSTQAALPACRACSSWTCHRTRSPACPAGSSSHSPTSATWT

SEQ ID NO: 33085 - protein, 59 aa, Homo sapiens
  MAP TO AC005222.1; EXPRESSED IN HELA, SIGNAL = 0.52; EXPRESSED IN LUNG, SIGNAL =   1; EXPRESSED IN BONE MARROW, SIGNAL = 1.2; SWISSPROT HIT: Q9Y618, EVALUE 3.60e+00
VLQGPSAAAAAPATGPGAWGAGLPIRLPVQPATDSLLHCPPGDHGAPRRATRHGGAVRL

SEQ ID NO: 33086 - protein, 49 aa, Homo sapiens
  MAP TO AC010609.5; EXPRESSED IN HEART, SIGNAL = 1.5; EXPRESSED IN BONE MARROW, SIGNAL = 1.3; EXPRESSED IN FETAL LIVER, SIGNAL = 1.2; EXPRESSED IN LUNG, SIGNAL = 1.1; EXPRESSED IN BRAIN, SIGNAL = 1.3; EXPRESSED IN HELA, SIGNAL =   1; SWISSPROT HIT: P33057, EVALUE 9.70e-01
LCPSSDTREDLFCYWEKLVYLLRPPVESYCSTPTLLSGDAPPEDNKSLV

SEQ ID NO: 33087 - protein, 29 aa, Homo sapiens
  MAP TO AC010609.5; EXPRESSED IN HEART, SIGNAL = 1.5; EXPRESSED IN BONE MARROW, SIGNAL = 1.3; EXPRESSED IN FETAL LIVER, SIGNAL = 1.2; EXPRESSED IN LUNG, SIGNAL = 1.1; EXPRESSED IN BRAIN, SIGNAL = 1.3; EXPRESSED IN HELA, SIGNAL =   1
WGTCNDNCTTEESTTFSSMHQCSRVILFR

SEQ ID NO: 33088 - protein, 31 aa, Homo sapiens
  MAP TO AC035144.2; EXPRESSED IN HELA, SIGNAL = 2.3; EXPRESSED IN BRAIN, SIGNAL = 1.8; EXPRESSED IN BONE MARROW, SIGNAL = 4.4; EXPRESSED IN FETAL LIVER, SIGNAL = 2.6; EXPRESSED IN HEART, SIGNAL = 2.4
WPQMSLIPKTWPFRHKRRSWVKWCPNPSPPP

SEQ ID NO: 33089 - protein, 180 aa, Homo sapiens
  MAP TO AC035144.2; EXPRESSED IN HELA, SIGNAL = 2.3; EXPRESSED IN BRAIN, SIGNAL = 1.8; EXPRESSED IN BONE MARROW, SIGNAL = 4.4; EXPRESSED IN FETAL LIVER, SIGNAL = 2.6; EXPRESSED IN HEART, SIGNAL = 2.4; SWISSPROT HIT: Q9PHM5, EVALUE 5.00e-02
ATDVFNSKNLAVQAQKKILGKMVSKSIATTLIDDTSSEVLDELYRVTREYTQNKKEAEKIIKNLIKTVIKLAILYRNNQFNQDELALMEKFKKKVHQLAMTVVSFHQVDYTFDRNVLSRLLNECREMLHQIIQRHLTAKSHGRVNNVFDHFSDCEFLAALYNPFGNFKPHLQKLCDGINK

SEQ ID NO: 33090 - protein, 1633 aa, Homo sapiens
  MAP TO AC027307.3; EXPRESSED IN BONE MARROW, SIGNAL = 0.85; EXPRESSED IN HELA, SIGNAL = 0.84; EXPRESSED IN BRAIN, SIGNAL = 4.8; SWISSPROT HIT: Q61315, EVALUE 1.00e-27
MLRNLVHSKHKMIAMGSAAALRNLLAHRPAKHQAAATAVSPGSCVPSLYVRKQRALEAELDARHLAQALEHLEKQGPPAAEAATKKPLPPLRHLDGLAQDYASDSGCFDDDDAPSSLAAAAATGEPASPAALSLFLGSPFLQGQALARTPPTRRGGKEAEKDTSGEAAVAAKAKAKLALAVARIDQLVEDISALHTSSDDSFSLSSGDPGQEAPREGRAQSCSPCRGPEGGRREAGSRAHPLLRLKAAHASLSNDSLNSGSASDGYCPREHMLPCPLAALASRREDPRCGQPRPSRLDLDLPGCQAEPPAREATSADARVRTIKLSPTYQHVPLLEGASRAGAEPLAGPGISPGARKQAWLPADHLSKVPEKLAAAPLSVASKALQKLAAQEGPLSLSRCSSLSSLSSAGRPGPSEGGDLDDSDSSLEGLEEAGPSEAELDSTWRAPGATSLPVAIPAPRRNRGRGLGVEDATPSSSSENYVQETPLVLSRCSSVSSLGSFESPSIASSIPSEPCSGQGSGTISPSELPDSPGQTMPPSRSKTPPLAPAPQGPPEATQFSLQWESYVKRFLDIADCRERCRLPSELDAGSVRFTVEKPDENFSCASSLSALALHEHYVQQDVELRLLPSACPERGGGAGGAGLHFAGHRRREEGPAPTGSRPRGAADQELELLRECLGAAVPARLRKVASALVPGRRALPVPVYMLVPAPAPAQEDDSCTDSAEGTPVNFSSAASLSDETLQGPPRDQPGGPAGRQRPTGRPTSARQAMGHRHKAGGAGRSAEQSRGAGKNRAGLELPLGRPPSAPADKDGSKPGRTRGDGALQSLCLTTPTEEAVYCFYGNDSDEEPPAAAPTPTHRRTSAIPRAFTRERPQGRKEAPAPSKAAPAAPPPARTQPSLIADETPPCYSLSSSASSLSEPEPSEPPAVHPRGREPAVTKDPGPGGGRDSSPSPRAAEELLQRCISSALPRRRPPVSGLRRRKPRATRLDERPAEGSRERGEEAAGSDRASDLDSVEWRAIQEGANSIVTWLHQAAAATREASSESDSILSFVSGLSVGSTLQPPKHRKGRQAEGEMGSARRPEKRGAASVKTSGSPRSPAGPEKPRGTQKTTPGVPAVLRGRTVIYVPSPAPRAQPKGTPGPRATPRKVAPPCLAQPAAPAKVPSPGQQRSRSLHRPAKTSELATLSQPPRSATPPARLAKTPSSSSSQTSPASQPLPRKRPPVTQAAGALPGPGASPVPKTPARTLLAKQHKTQRSPVRIPFMQRPARRGPPPLARAVPEPGPRGRAGTEAGPGARGGRLGLVRVASALSSGSESSDRSGFRRQLTFIKESPGLRRRRSELSSAESAASAPQGASPRRGRPALPAVFLCSSRCEELRAAPRQGPAPARQRPPAARPSPGERPARRTTSESPSRLPVRAPAARPETVKRYASLPHISVARRPDGAVPAAPASADAARRSSDGEPRPLPRVAAPGTTWRRIRDEDVPHILRSTLPATALPLRGSTPEDAPAGPPPRKTSDAVVQTEEVAAPKTNSSTSPSLETREPPGAPAGGQLSLLGSDVDGPSLAKAPISAPFVHEGLGVAVGGFPASRHGSPSRSARVPPFNYVPSPMVVAATTDSAAEKAPATASATLLE

SEQ ID NO: 33091 - protein, 60 aa, Homo sapiens
  MAP TO AC027307.3; EXPRESSED IN BONE MARROW, SIGNAL = 0.85; EXPRESSED IN HELA, SIGNAL = 0.84; EXPRESSED IN BRAIN, SIGNAL = 4.8; SWISSPROT HIT: P50241, EVALUE 6.10e+00
PSPRPARPPPPTPACAPSSCRLPISTCHCLRVPQGRVQSPSRGLESLQGPGSRPGCRQTT

SEQ ID NO: 33092 - protein, 40 aa, Homo sapiens
  MAP TO AC027307.3; EXPRESSED IN BONE MARROW, SIGNAL = 0.85; EXPRESSED IN HELA, SIGNAL = 0.84; EXPRESSED IN BRAIN, SIGNAL = 4.8
AGAPGSQLSADAAAASDFAQPDHREQRVRHALEPVGPQRP

SEQ ID NO: 33093 - protein, 199 aa, Homo sapiens
  MAP TO AL049853.1; EXPRESSED IN PLACENTA, SIGNAL = 3.9; EXPRESSED IN HEART, SIGNAL = 3.2; EXPRESSED IN BONE MARROW, SIGNAL = 2.6; EXPRESSED IN FETAL LIVER, SIGNAL = 1.9; SWISSPROT HIT: P23206, EVALUE 3.00e-08
MPSPAALGWLGPPQCPHLPPWAGWDHPNALTCCPGLPGTTPMPSPAALGWDHPNALTCRPGLAGTTPMPSPAALGWLGPPQCPHLPPRAGWDHPNALTCRPGLAGTTPMPSPAALGLGPPQCPHLPPWAGWDHPNALTCRPGLAGTTPMPSPAALGWLGPPQCPHLEQTRQEFWGPPGKVPQTGAPQTAWGLAWHAPAQ

SEQ ID NO: 33094 - protein, 198 aa, Homo sapiens
  MAP TO AL049853.1; EXPRESSED IN PLACENTA, SIGNAL = 3.9; EXPRESSED IN HEART, SIGNAL = 3.2; EXPRESSED IN BONE MARROW, SIGNAL = 2.6; EXPRESSED IN FETAL LIVER, SIGNAL = 1.9; SWISSPROT HIT: Q62203, EVALUE 2.00e-07
ALTCRPGLAGTTPMPSPAALGWLGPPQCPHLLPRAAWDHPNALTCRPGLGPPQCPHLPPWAGWDHPNALTCRPGLAGTTPMPSPAAPGWLGPPQCPHLPPWAGWDHPNALTCCPGLGTTPMPSPAALGWLGPPQCPHLPPWAGWDHPNALTCRPGLAGTTPMPSPGADKTGVLGPPRKSTTDWSSPDSMGTGMACPRS

SEQ ID NO: 33095 - protein, 36 aa, Homo sapiens
  MAP TO AF176681.1; EXPRESSED IN HELA, SIGNAL = 0.67; EXPRESSED IN BONE MARROW, SIGNAL = 0.81; SWISSPROT HIT: P49910, EVALUE 2.90e+00
CDTRTEDKEFLHKEDIHEDLESQAEISENYAGDVSQ

SEQ ID NO: 33096 - protein, 197 aa, Homo sapiens
  MAP TO AC003006.1; EXPRESSED IN HELA, SIGNAL = 1.6; EXPRESSED IN BONE MARROW, SIGNAL = 1.1; SWISSPROT HIT: Q13398, EVALUE 2.00e-56
CWHGGEDEAAPSKQSTCIHIYKDQGGHSGERPYECGEYRKLFKNKSCLTEPRRDHKHRNVRTGERPYECSKYGKLFHQKPTLHIHERFHTGQKTYECSECGKSFHQSSSLLQRQTLHTRERPYECIECGKAFAEKSSLINHRKVHSGAKRYECNECGKSFAYTSSLIKHRRIHTGERPYECSECGRSFAENSSLIKH

SEQ ID NO: 33097 - protein, 218 aa, Homo sapiens
  MAP TO AL160236.1; EXPRESSED IN BONE MARROW, SIGNAL = 0.8; EXPRESSED IN HELA, SIGNAL =   2; SWISSPROT HIT: P38793, EVALUE 4.00e-08
ILWRPFGFSGRFLKLESHSITESKSLIPVAWTSLTQMLLEAPGIFLLGQRKRFSTMPETETHERETELFSPPSDVRGMTKLDRTAFKKTVNIPVLKVRKEIVSKLMRSLKRAALQRPGIRRVIEDPEDKESRLIMLDPYKIFTHDSFEKAELSVLEQLNVSPQISKYNLELTYEHFKSEEILRAVLPEGQDVTSGFSRIGHIAHLNLRDHQLSFKHLI

SEQ ID NO: 33098 - protein, 214 aa, Homo sapiens
  MAP TO AC067968.1; EXPRESSED IN LUNG, SIGNAL = 1.1; EXPRESSED IN BONE MARROW, SIGNAL = 1.4; EXPRESSED IN HEART, SIGNAL = 1.5; EXPRESSED IN FETAL LIVER, SIGNAL = 1.2; SWISSPROT HIT: Q9UK12, EVALUE 1.00e-130
GKIQTEMETVPEAGTHEEFSCKQIWEQIASDLTRSQDTTISNSQLFEQDDNPSQIKARLSTVHTREKPFQGENCKQFFSDVSFFDLPQQLYSGEKSHTCDECGKSFCYISALHIHQRVHMGVKCYKCDVCGKEFSQSSRLQTHQRVHTGEKPFKCEQCGKGFRCRSALKVHCKLHMREKPYNCEKCGKAFMHNFQLQKHHRIHTGEKPFKCEIC

SEQ ID NO: 33099 - protein, 25 aa, Homo sapiens
  MAP TO AC067968.1; EXPRESSED IN LUNG, SIGNAL = 1.1; EXPRESSED IN BONE MARROW, SIGNAL = 1.4; EXPRESSED IN HEART, SIGNAL = 1.5; EXPRESSED IN FETAL LIVER, SIGNAL = 1.2
WRLFQKQEHMKNFPASKFGNKLQVT

SEQ ID NO: 33100 - protein, 17 aa, Homo sapiens
  MAP TO AP000532.1; EXPRESSED IN HELA, SIGNAL = 0.94; EXPRESSED IN BONE MARROW, SIGNAL = 0.98
SLELPVPGALHLGAQLA

SEQ ID NO: 33101 - protein, 65 aa, Homo sapiens
  MAP TO AL163207.2; EXPRESSED IN PLACENTA, SIGNAL = 2.2; EXPRESSED IN BRAIN, SIGNAL = 2.6; EXPRESSED IN FETAL LIVER, SIGNAL = 2.8; EXPRESSED IN HEART, SIGNAL = 1.7; EXPRESSED IN BONE MARROW, SIGNAL = 2.2; EXPRESSED IN LUNG, SIGNAL = 2.4
MLPRQHAPLPGAPPPGAPPSDAPPAGAPPPACSSTSVLLLQRAPPPGAPPPACSSTAPPPACSCA

SEQ ID NO: 33102 - protein, 124 aa, Homo sapiens
  MAP TO AL163207.2; EXPRESSED IN PLACENTA, SIGNAL = 2.2; EXPRESSED IN BRAIN, SIGNAL = 2.6; EXPRESSED IN FETAL LIVER, SIGNAL = 2.8; EXPRESSED IN HEART, SIGNAL = 1.7; EXPRESSED IN BONE MARROW, SIGNAL = 2.2; EXPRESSED IN LUNG, SIGNAL = 2.4
VLLLQMLLQQVLPRQRAPPPACSSSSVLLHQVLLHQRAPPLLLRQRAHAPGAPSPACSSARCSSSRCSPTSVLPHQRAPPPGAPPPACSSTAPPPACSSARCSFASVLLHCSSASVLLRQVLLR

SEQ ID NO: 33103 - protein, 190 aa, Homo sapiens
  MAP TO AL133243.1; EXPRESSED IN PLACENTA, SIGNAL =   3; EXPRESSED IN HELA, SIGNAL = 4.8; EXPRESSED IN LUNG, SIGNAL = 2.7; EXPRESSED IN BONE MARROW, SIGNAL = 3.1; EXPRESSED IN FETAL LIVER, SIGNAL = 3.3; SWISSPROT HIT: Q9NR09, EVALUE 1.00e-92
GAFQTGQGPLDAQVKLLEFTLEQNFEVVSVSTISAVIESVTFLVHHYITCSDKVMSRSGSDSSVGARACFGGLFANLIRPGDAKAVCGEMTRDQLMFDLLKLVNILVQLPLSGNREYSARVSVTTNTTDSVSDEEKVSGGKDGNGSSTSVQGSPAYVADLVLANQQIMSQILSALGLCNSSAMAMIIGMY

SEQ ID NO: 33104 - protein, 151 aa, Homo sapiens
  MAP TO Z84464.1; EXPRESSED IN BONE MARROW, SIGNAL = 0.81; EXPRESSED IN PLACENTA, SIGNAL = 1.5; EXPRESSED IN HELA, SIGNAL = 0.63; SWISSPROT HIT: P09849, EVALUE 9.00e-16
VDTTLSQFTDLNVYLWDVHHSKRLIKVDGVVTKKRKSYCVDFAAIQPQIALLQEMHVTHFRFSLDWALILPLGNQSQVNHTILQYYRCMASELVRVNITPVVALWQPMAPNQGLPRLLARQGAWENPYTALAFAEYARLCFQELGHHVKLW

SEQ ID NO: 33105 - protein, 538 aa, Homo sapiens
  MAP TO AC009470.2; EXPRESSED IN HELA, SIGNAL = 0.89; EXPRESSED IN BONE MARROW, SIGNAL = 0.8; SWISSPROT HIT: Q9Y493, EVALUE 2.00e-14
MWVVDQGRGQGTMSVEKGGLFRFPLLDGRERRGKQPRRTRELHKSRGQGAPSEAGVRERSPLERGCKGVPMLREKTWGPWNGLMVIGKRVELLTRNTRKPKLESEYWRLEDVEKTVLKGKSGPSQERMDVKLLYRGASASQASADLGKDSPRGIWGKQEVKHEIKAKSKSAGMTAGPMKGSGFEERLRSAGEKVGTSGEDLRSNGYKLGQDEKGLRSSVDKMRSSVEKLRSTSEKLVCRGEKQGSSGVKLRSSGRKLRSSGENLRSSREKLRWSGEKLGTSGEKLGTSDEKLRLSGEMLRSIREKLRLSGEKLGTSDEKLRLSGEKLRLSGEKLRSSREKLRLSGEKLGTSDEKLRLSGEKLRSSREKLRLSGEKLRSSREKLRLSGEKLGTSDEKLRLSGEKLRSSREKLGTSGEKLRSSREKLRLSGEKLGSSAEKLRSSEEKLGTSGEKLEGSRMGSINEKNIEKVVEVTGDERVMAFTHDEMEIPFESVKGSEELQGTEKGVGVEGGILSEVKDITDESVSMEKKDIIGEGTSE

SEQ ID NO: 33106 - protein, 283 aa, Homo sapiens
  MAP TO AC011841.3; EXPRESSED IN PLACENTA, SIGNAL = 2.1; EXPRESSED IN BRAIN, SIGNAL = 1.7; EXPRESSED IN HEART, SIGNAL = 1.3; EXPRESSED IN BONE MARROW, SIGNAL = 1.2; SWISSPROT HIT: Q28833, EVALUE 3.00e-05
IPEQCYEGLNGCPTLRIPEHPSCGLNNCPSHRIPEHCCWVLSVCPSHRIPEHCYDGLNVCPSNRIPEHCYEGINYSPSHRIPEHSCCCLNICSPLSIQEHSCCSLSVCPSLRIPEHYCWVLSVCPSGTIPQHCHVGLYVCLLRRIPEQCYEGLNVFLAHRTPEHSCCVLNVFSYDRIPEECYECLNACRTCRIPENPSCGLNDCPSHRIPEHCCWVFRVCPYHSIPEHCDEGLNICHSHRIPEHCYWVLSVCPSQRIPEQCCCGLNVCLSYRIPEHYCCGLNV

SEQ ID NO: 33107 - protein, 81 aa, Homo sapiens
  MAP TO AF176815.1; EXPRESSED IN HELA, SIGNAL = 0.53; EXPRESSED IN BRAIN, SIGNAL = 1.4; EXPRESSED IN BONE MARROW, SIGNAL =   1; SWISSPROT HIT: P55201, EVALUE 7.00e-33
YIEKSAEELDEEVEYDMDEEDYIWLDIMNERRKTEGVSPIPQEIFEYLMDRLEKESYFESHNKGDPNALVDEDAVCCICND

SEQ ID NO: 33108 - protein, 112 aa, Homo sapiens
  MAP TO AF038458.1; EXPRESSED IN HEART, SIGNAL = 3.5; EXPRESSED IN PLACENTA, SIGNAL = 3.7; EXPRESSED IN BRAIN, SIGNAL =   3; EXPRESSED IN BONE MARROW, SIGNAL = 2.7; SWISSPROT HIT: Q64739, EVALUE 6.70e-01
HSRLQRQVLSLYRDLLRAGRGKPGAEARVRAEFRQHAGLPRSDVLRIEYLYRRGRRQLQLLRSGHATAMGAFVRPRAPTGEPGGVGCQPDDGDSPRNPHDSTGAPETRPDGR

SEQ ID NO: 33109 - protein, 149 aa, Homo sapiens
  MAP TO AP000038.1; EXPRESSED IN HELA, SIGNAL = 0.81; EXPRESSED IN BONE MARROW, SIGNAL = 0.76; EXPRESSED IN FETAL LIVER, SIGNAL = 0.94; SWISSPROT HIT: Q9QZZ4, EVALUE 1.50e+00
DDFPYINMDDFPYVNMDDFPYVNMDDFPYVNMDDFPYVNMDDFPYVNMDDFPYINMDDFPYINIDDFPYVNMDDFPYVNMDDFPYVNMDDFPYVNMDDFPYINMDDFPYINMDDFPYINMDDFPYINMDDFPYVNMDDFPYVNMDDFIE

SEQ ID NO: 33110 - protein, 170 aa, Homo sapiens
  MAP TO AC009974.2; EXPRESSED IN FETAL LIVER, SIGNAL = 1.4; EXPRESSED IN PLACENTA, SIGNAL = 2.7; EXPRESSED IN BONE MARROW, SIGNAL = 1.4
FIQELLAGSDESYRPLRSLLGHPENSVRAHTYRLLGHLLQHSMALRGALQSQSGLLSLLLLGLGDKDPVVRCSASFAVGNAAYQAGPLGPALAAAVPSMTQLLGDPQAGIRRNVASALGNLGPEGLGEELLQCEVPQRLLEMACGDPQPNVKEAALIALRSLQQEPGIHQ

SEQ ID NO: 33111 - protein, 98 aa, Homo sapiens
  MAP TO AC009974.2; EXPRESSED IN FETAL LIVER, SIGNAL = 1.4; EXPRESSED IN PLACENTA, SIGNAL = 2.7; EXPRESSED IN BONE MARROW, SIGNAL = 1.4; SWISSPROT HIT: P06734, EVALUE 7.20e+00
LSKSFWLALMNPIGPCAASWATQRILCGHTLIGSWDTCSNTAWPCVGHCRASLDCSAFCCLGLETRILLCGAVPALLWAMQPTRLVLWDLPWQLQCPV

SEQ ID NO: 33112 - protein, 40 aa, Homo sapiens
  MAP TO AL132988.3; EXPRESSED IN HELA, SIGNAL = 6.2; EXPRESSED IN LUNG, SIGNAL = 2.4; EXPRESSED IN BONE MARROW, SIGNAL = 3.2; SWISSPROT HIT: Q13023, EVALUE 3.00e-17
GRLDSLTEVDDSGQLTIKCSQNYLSLDCGITAFELSDYSP

SEQ ID NO: 33113 - protein, 60 aa, Homo sapiens
  MAP TO AL136112.9; EXPRESSED IN HELA, SIGNAL = 1.5; EXPRESSED IN BRAIN, SIGNAL = 0.83; EXPRESSED IN BONE MARROW, SIGNAL = 0.93; SWISSPROT HIT: P31822, EVALUE 8.00e+00
WTATRTITISTTMTAGRISTAPRRPARTSGRNSSWCRRPGTWVPQPGTQPSALVSWNRGR

SEQ ID NO: 33114 - protein, 290 aa, Homo sapiens
  MAP TO AL121809.1; EXPRESSED IN PLACENTA, SIGNAL = 2.3; EXPRESSED IN HELA, SIGNAL = 2.8; EXPRESSED IN BRAIN, SIGNAL = 0.93; EXPRESSED IN BONE MARROW, SIGNAL = 0.93; EXPRESSED IN LUNG, SIGNAL = 0.99; EXPRESSED IN FETAL LIVER, SIGNAL = 1.4; SWISSPROT HIT: P40414, EVALUE 3.50e-01
NLRFWSLVLSYEIKETTEELDVSIDILTSREQFFSDEERKYMAINQKKAYILVTPLKSRKVIEQRCMRYNLSAGTIKAVTDFVIPECQKKSPISKSMGTLENTFEGHKSKNKEDCDERDLLTVNRKIKISNLEKEQMLTSDFKKNTRLLPKLKKIENQVAMSFYKHQSSPDLSSEESETEKEIKRKAEVKKTKAGNTKEAVVHLRKSTRNTSNIPVILEPETEESENEFYIKQKKARPSVKETLQKSGVRKEFPITEAVGSDKTNRHPLECLPGLIQDKEWNEKELQKLH

SEQ ID NO: 33115 - protein, 258 aa, Homo sapiens
  MAP TO AL356021.1; EXPRESSED IN HELA, SIGNAL = 1.4; EXPRESSED IN BONE MARROW, SIGNAL = 0.94; SWISSPROT HIT: Q9Y2P7, EVALUE 4.70e+00
GSGAPQLESGDSQRTRPLLPVCLLLPFMAFRLFGPTGTCVPALSCPQAHLDSLLCSLAPKVQRGEEAGGWRVHTASSVHTPAQAATRPGLTTTLLQDQSKCRERGEARQQEQTPLSLRGQGAGPSRPRECRDAWVCSHDLGGCSCTWEGGAPACSQPLLVPCRVERTTTLDLPPPRGPSLPAPPCPTVLLPQQRTTQPDPITAAPRAVGSEGLPGVGSRDCPPPVRIFTAASVDKVQVAWRPWPAPQQINLTLSELSQ

SEQ ID NO: 33116 - protein, 55 aa, Homo sapiens
  MAP TO AL137818.2; EXPRESSED IN HELA, SIGNAL = 0.94; EXPRESSED IN BRAIN, SIGNAL = 0.78; EXPRESSED IN BONE MARROW, SIGNAL = 0.79; SWISSPROT HIT: Q04609, EVALUE 1.10e-01
IDDAQILPRSTRVRHFSQSEETGNEVFGALNEEQPLPRSSSTSDILEPFTVERAK

SEQ ID NO: 33117 - protein, 306 aa, Homo sapiens
  MAP TO AL137818.2; EXPRESSED IN HELA, SIGNAL = 0.94; EXPRESSED IN BRAIN, SIGNAL = 0.78; EXPRESSED IN BONE MARROW, SIGNAL = 0.79; SWISSPROT HIT: P25386, EVALUE 1.00e-03
PVELADSAFEQIQYIDLEGDDDLLSTLKEYFKENQENHSKNETGKDPASQEVTIAVNRGERLSLDKLECTDQETESENITSFVGTPENLQFQKEPNSAVFMSNIAPNQSDSFFRTQTSEKSKQLNTDKQPSEPSLDSPCDKEKRKHLYRQAATELDACVDVTLVEKLKSVQINEKITVPHVMRAKKATLKAPVNRRMPHVTSTSKLSPTKRSLSETVTHRAKIMKIATKKRNSVHVTFRPSTESVQFYNPLENKEAPWKMRLRKLGGFSSGSSNSSTSNTHTSTNSATELVKPGVYRPLDTLGTAS

SEQ ID NO: 33118 - protein, 174 aa, Homo sapiens
  MAP TO AL096800.20; EXPRESSED IN BONE MARROW, SIGNAL = 0.79; EXPRESSED IN BRAIN, SIGNAL = 1.1; SWISSPROT HIT: P38994, EVALUE 3.00e-15
SSFDPGAPSCTASSASGILSPTASEVPYASGMPIKKTGHRGVDSSGETTYKKTTSTALKGAIQLGITYTVGSLSTKPERDVLMQDFYVVESIFFPSEGSNLTPAHHYNAFRFKTYAPVAFRYFRELFGIPPDDYLCSLCSEPLIELCSSGASGSLFYVSSDDELIIKTLQHKEA

SEQ ID NO: 33119 - protein, 196 aa, Homo sapiens
  MAP TO AC004586.1; EXPRESSED IN PLACENTA, SIGNAL = 5.2; EXPRESSED IN BONE MARROW, SIGNAL = 1.6; EXPRESSED IN LUNG, SIGNAL = 2.1; SWISSPROT HIT: P09958, EVALUE 1.00e-90
CEEGFSLHQKSCVQHCPPGFAPQVLDTHYSTENDVETIRASVCAPCHASCATCQGPALTDCLSCPSHASLDPVEQTCSRQSQSSRESPPQQQPPRLPPEVEAGQRLRAGLLPSHLPEVVAGLSCAFIVLVFVTVFLVLQLRSGFSFRGVKVYTMDRGLISYKGLPPEAWQEECPSDSEEDEGRGERTAFIKDQSAL

SEQ ID NO: 33120 - protein, 242 aa, Homo sapiens
  MAP TO AF205588.1; EXPRESSED IN LUNG, SIGNAL = 1.1; EXPRESSED IN FETAL LIVER, SIGNAL = 1.3; EXPRESSED IN BONE MARROW, SIGNAL = 1.2; EXPRESSED IN HELA, SIGNAL = 0.89; EXPRESSED IN BRAIN, SIGNAL = 1.3; SWISSPROT HIT: Q06730, EVALUE 2.00e-84
QTHPRENHYGNECGENIFEESILLEHQSVYPFSQKLNLTPIQRTHSINNIIEYNECGTFFSEKLVLHLQQRTHTGEKPYECHECGKTFTQKSAHTRHQRTHTGGKPYECHECGKTFYKNSDLIKHQRIHTGERPYGCHECGKSFSEKSTLTQHQRTHTGEKPYECHECGKTFSFKSVLTVHQKTHTGEKPYECYACGKAFLRKSDLIKHQRIHTGEKPYECNECGKSFSEKSTLTKHLRTHT

SEQ ID NO: 33121 - protein, 458 aa, Homo sapiens
  MAP TO AC005923.2; EXPRESSED IN PLACENTA, SIGNAL = 3.9; EXPRESSED IN BRAIN, SIGNAL = 2.2; EXPRESSED IN LUNG, SIGNAL =   2; EXPRESSED IN HEART, SIGNAL =   2; EXPRESSED IN BONE MARROW, SIGNAL = 1.9; SWISSPROT HIT: Q14517, EVALUE 7.00e-68
TSANRARFRRAANRHPQFPQYNYQTLVPENEAAGTAVLRVVAQDPDAGEAGRLVYSLAALMNSRSLELFSIDPQSGLIRTAAALDRESMERHYLRVTAQDHGSPRLSATTMVAVTVADRNDHSPVFEQAQYRETLRENVEEGYPILQLRATDGDAPPNANLRYRFVGPPAARAAAAAAFEIDPRSGLISTSGRVDREHMESYELVVEASDQGQEPGPRSATVRVHITVLDENDNAPQFSEKRYVAQVREDVRPHTVVLRVTATDRDKDANGLVHYNIISGNSRGHFAIDSLTGEIQVVAPLDFEAEREYALRIRAQDAGRPPLSNNTGLASIQVVDINDHIPIFVSTPFQVSVLENAPLGHSVIHIQAVDADHGENARLEYSLTGVAPDTPFVINSATGWVSVSGPLDRESVEHYFFGVEARDHGSPPLSASASVTVTVLDVNDNRPEFTMKEYHLRL

SEQ ID NO: 33122 - protein, 416 aa, Homo sapiens [sequence omitted]

SEQ ID NO: 33123 - protein, 335 aa, Homo sapiens
  MAP TO AL136040.3; EXPRESSED IN PLACENTA, SIGNAL = 1.5; EXPRESSED IN BRAIN, SIGNAL = 1.1; EXPRESSED IN HEART, SIGNAL = 1.2; EXPRESSED IN BONE MARROW, SIGNAL = 0.9; SWISSPROT HIT: Q9Y6Q2, EVALUE 7.00e-31
NSSSLQEDEEVEMEAISWQASSPAMNGHPAPPVTSARFPSWVTFDDNEVSCPLPPVTSPLKPNTPPSASVIPDVPYNSMGSFKKRDRPKSTLMNFSKVQKLDISSLNRTPSVTEASPWRATNPFLNETLQDVQPSPINPFSAFFEEQERRSQNSSISSTTGKSQRDSLIVIYQDAISFDDSSKTQSHSDAVEKLKQLQIDDPDHFGSATLPDDDPVAWIELDAHPPGSARSQPRDGWPMMLRIPEKKNIMSSRHWGPIFVKLTDTGYLQLYYEQGLEKPFREFKLEICHEISEPRLQNYDENGRIHSLRIDRVTYKEKKKYQPKPAVAHTAEREQ

SEQ ID NO: 33124 - protein, 26 aa, Homo sapiens
  MAP TO Z68694.1; EXPRESSED IN HELA, SIGNAL = 1.6; EXPRESSED IN BRAIN, SIGNAL = 1.5; EXPRESSED IN BONE MARROW, SIGNAL =   1
KGKEGNISTWKSSTKKMKESQRMKET

SEQ ID NO: 33125 - protein, 239 aa, Homo sapiens
  MAP TO AC023066.2; EXPRESSED IN BRAIN, SIGNAL = 1.3; EXPRESSED IN BONE MARROW, SIGNAL = 0.97; EXPRESSED IN FETAL LIVER, SIGNAL = 1.1; SWISSPROT HIT: P40631, EVALUE 1.00e-03
QRKQVSDSGDIKIKSWRGNNKKECWSYLSTNKKMKSDGLGASGHSSSTNRNSINKTLKQDDVKEKDGTKIASKITKELKTGGKNVSGKPKTVTKSKTENGDKARLENMSPRQVVERSATAAAAATGQKNLLNGKGVRNQEGQISGARPKVLTGNLNVQAKAKPLKKATGKDSPCLSIAGPSSRSTDSSMEFSISTECLDEPKENGSTEEEKPSGHKLSFCDSPGQMMKNSVDSVKNSTV

SEQ ID NO: 33126 - protein, 57 aa, Homo sapiens
  MAP TO AC019140.2; EXPRESSED IN BONE MARROW, SIGNAL = 0.93; EXPRESSED IN BRAIN, SIGNAL =   1; EXPRESSED IN FETAL LIVER, SIGNAL = 1.1
VDRMSFPCGCTKEGCSNTAGRIEFNPIRVRTHFLHTIMKLELEKNREQQIPTLNGCH

SEQ ID NO: 33127 - protein, 25 aa, Homo sapiens
  MAP TO AC019140.2; EXPRESSED IN BONE MARROW, SIGNAL = 0.93; EXPRESSED IN BRAIN, SIGNAL =   1; EXPRESSED IN FETAL LIVER, SIGNAL = 1.1
EEEEEEEEEEEEEDDDDDKGDGFVE

SEQ ID NO: 33128 - protein, 181 aa, Homo sapiens
  MAP TO AL008639.15; EXPRESSED IN BRAIN, SIGNAL = 0.79; EXPRESSED IN BONE MARROW, SIGNAL = 2.5; EXPRESSED IN FETAL LIVER, SIGNAL = 0.96; EXPRESSED IN LUNG, SIGNAL = 1.9; SWISSPROT HIT: Q99439, EVALUE 2.00e-46
HEFHAVQQGAFLPAFCRDQEPAPVQMRPSEAGGALQLDRGTHPPLFQPRLPEESEGRDCLMHTHEQAGLSPQDQRLMQNWHQLENLSNFIKAMVGYDMNPMDLFEANDLFESRNMTQVQLSLLALAGKVKTKLLQNGVDVGVKYSEKQERNFDDATLKASQCLTELQMGTNICACQSGATT

SEQ ID NO: 33129 - protein, 43 aa, Homo sapiens
  MAP TO AL008639.15; EXPRESSED IN BRAIN, SIGNAL = 0.79; EXPRESSED IN BONE MARROW, SIGNAL = 2.5; EXPRESSED IN FETAL LIVER, SIGNAL = 0.96; EXPRESSED IN LUNG, SIGNAL = 1.9; SWISSPROT HIT: Q08094, EVALUE 2.00e-09
GLTRLSFSPDFQKSLKEGIVLCTLMNKLGSVPKINGSCRTGTS

SEQ ID NO: 33130 - protein, 416 aa, Homo sapiens
  MAP TO AL157687.1; EXPRESSED IN HEART, SIGNAL = 3.2; EXPRESSED IN BONE MARROW, SIGNAL = 2.2; EXPRESSED IN FETAL LIVER, SIGNAL = 1.9; EXPRESSED IN HELA, SIGNAL = 0.77; EXPRESSED IN BRAIN, SIGNAL = 2.6; SWISSPROT HIT: O77797, EVALUE 1.10e-01
AQYSGFLFFHEGWPLCLHEQVVVQLAALPWQLLRPGDFYLQVVPSAAQAPRLALKCLAPGGGRVQEVPVPNEACAYLFTPEWLQGINKDRPTGRLSTCLLSAPSGIQRLPWAELICPRFVHKEGLMVGHQPSTLPPELPSGPPGLPSPPLPEEALGTRSPGDGHNAPVEGPEGEYVELLEVTLPVRGSPTDAEGSPGLSRVRTVPTRKGAGGKGRHRRHRAWMHQKGLGPRGQDGARPPGEGSSTGASPESPPGAEAVPEAAVLEVSEPPAEAVGEASGSCPLRPGELRGGGGGGQGAEGPPGTPRRTGKGNRRKKRAAGRGALSRGGDSAPLSPGDKEDASHQEALGNLPSPSEHKLPECHLVKEEYEGSGKPESEPKELKTAGEKEPQLSEACGPTEEGAGERELEGPGLLCMA

SEQ ID NO: 33131 - protein, 24 aa, Homo sapiens
  MAP TO AL157687.1; EXPRESSED IN HEART, SIGNAL = 3.2; EXPRESSED IN BONE MARROW, SIGNAL = 2.2; EXPRESSED IN FETAL LIVER, SIGNAL = 1.9; EXPRESSED IN HELA, SIGNAL = 0.77; EXPRESSED IN BRAIN, SIGNAL = 2.6
PNTVDSSSSMRGGRSACMNRWWCS

SEQ ID NO: 33132 - protein, 274 aa, Homo sapiens
  MAP TO AL096706.10; EXPRESSED IN BRAIN, SIGNAL =   1; EXPRESSED IN HELA, SIGNAL = 0.65; EXPRESSED IN BONE MARROW, SIGNAL = 0.82; SWISSPROT HIT: P56975, EVALUE 3.00e-81
MSEGAAAASPPGAASAAAASAEEGTAAAAAAAAAGGGPDGGGEGAAEPPRELRCSDCIVWNRQQTWLCVVPLFIGFIGLGLSLMLLKWIVVGSVKEYVPTDLVDSKGMGQDPFFLSKPSSFPKAMETTTTTTSTTSPATPSAGGAASSRTPNRISTRLTTITRAPTRFPGHRVPIRASPRSTTARNTAAPATVPSTTAPFFSSSTLGSRPPVPGTPSTQAMPSWPTAAYATSSYLHDSTPSWTLSPFQDAASSSSSSSSSATTTTPETSTSPKF

SEQ ID NO: 33133 - protein, 37 aa, Homo sapiens
  MAP TO AL096706.10; EXPRESSED IN BRAIN, SIGNAL =   1; EXPRESSED IN HELA, SIGNAL = 0.65; EXPRESSED IN BONE MARROW, SIGNAL = 0.82
RRLGRGGHRGGCGGGSGGRGPGRRRRRGGRAPPGVTL

SEQ ID NO: 33134 - protein, 185 aa, Homo sapiens
  MAP TO X66401.1; EXPRESSED IN BONE MARROW, SIGNAL = 0.84; EXPRESSED IN HELA, SIGNAL = 1.2; SWISSPROT HIT: Q03518, EVALUE 3.00e-40
MAELLASAGSACSWDFPRAPPSFPPPAASRGGLGGTRSFRPHRGAESPRPGRDRDGVRVPMASSRCPAPRGCRCLPGASLAWLGTVLLLLADWVLLRTALPRIFSLLVPTALPLLRVWAVGLSRWAVLWLGACGVLRATVGSKSENAGAQGWLAALKPLAAALGLALPGLALFRELISWGAPGSA

SEQ ID NO: 33135 - protein, 751 aa, Homo sapiens
  MAP TO AL109653.9; EXPRESSED IN HELA, SIGNAL = 1.1; EXPRESSED IN BONE MARROW, SIGNAL = 0.98; SWISSPROT HIT: O94991, EVALUE 0.00e+00
NNGLQEIRTGAFSGLKTLKRLHLNNNKLEILREDTFLGLESLEYLQADYNYISAIEAGAFSKLNKLKVLILNDNLLLSLPSNVFRFVLLTHLDLRGNRLKVMPFAGVLEHIGGIMEIQLEENPWNCTCDLLPLKAWLDTITVFVGEIVCETPFRLHGKDVTQLTRQDLCPRKSASDSSQRGSHADTHVQRLSPTMNPALNPTRAPKASRPPKMRNRPTPRVTVSKDRQSFGPIMVYQTKSPVPLTCPSSCVCTSQSSDNGLNVNCQERKFTNISDLQPKPTSPKKLYLTGNYLQTVYKNDLLEYSSLDLLHLGNNRIAVIQEGAFTNLTSLRRLYLNGNYLEVLYPSMFDGLQSLQYLYLEYNVIKEIKPLTFDALINLQLLFLNNNLLRSLPDNIFGGTALTRLNLRNNHFSHLPVKGVLDQLPAFIQIDLQENPWDCTCDIMGLKDWTEHANSPVIINEVTCESPAKHAGEILKFLGREAICPDSPNLSDGTVLSMNHNTDTPRSLSVSPSSYPELHTEVPLSVLILGLLVVFILSVCFGAGLFVFVLKRRKGVPSVPRNTNNLDVSSFQLQYGSYNTETHDKTDGHVYNYIPPPVGQMCQNPIYMQKEGDPVAYYRNLQEFSYSNLEEKKEEPATPAYTISATELLEKQATPREPELLYQNIAERVKELPSAGLVHYNFCTLPKRQFAPSYESRRQNQDRINKTVLYGTPRKCFVGQSKPNHPLLQAKPQSEPDYLEVLEKQTAISQL

SEQ ID NO: 33136 - protein, 33 aa, Homo sapiens
  MAP TO AL109653.9; EXPRESSED IN HELA, SIGNAL = 1.1; EXPRESSED IN BONE MARROW, SIGNAL = 0.98
GRDLTDRESQNCQRHLQDPLSVRRKGKRTEYQL

SEQ ID NO: 33137 - protein, 67 aa, Homo sapiens
  MAP TO AL161668.1; EXPRESSED IN HELA, SIGNAL = 1.7; EXPRESSED IN BONE MARROW, SIGNAL = 1.1; EXPRESSED IN LUNG, SIGNAL = 1.4; SWISSPROT HIT: P98157, EVALUE 1.40e+00
HMNGWMRALLGWQELGRVGRLCWLHWPCGGPQSPVPAPSRRCGPWPWTWAAQQPCENGAAARPAAKS

SEQ ID NO: 33138 - protein, 45 aa, Homo sapiens
  MAP TO AF205588.1; EXPRESSED IN HELA, SIGNAL = 0.57; EXPRESSED IN BRAIN, SIGNAL = 0.78; EXPRESSED IN BONE MARROW, SIGNAL = 0.9; SWISSPROT HIT: Q06730, EVALUE 3.00e-21
VWTADHLKERSQENQSKHLWEVVFINNEMLTKEQGDVIGIPFNVD

SEQ ID NO: 33139 - protein, 301 aa, Homo sapiens
  MAP TO AL021579.1; EXPRESSED IN HELA, SIGNAL = 1.9; EXPRESSED IN HEART, SIGNAL = 1.5; EXPRESSED IN BONE MARROW, SIGNAL = 1.7
VWNKKNANEKGRSQTSKLPPRFAKKQATGIQQAQSSASVPPLASAPLPPSTSASVPASTSAPLPATLTPVPASTSAPVPASTLAPVLASTSAPVPASPLAPVSASASVSASVPASTSAAAITSSSAPASAPAPTPILASVSTPASVTILASASIPILASALASTSAPTPAPAASSPAAPVITAPTIPASAPTASVPLAPASASAPAPAPTPVSAPNPAPPAPAQTQAQTHKPVQNPLQTTSQSSKQPPPSIRLPSAQTPNGTDYVASGKSIQTPQSHGTLTAELWDNKVAPPAVLNDISKK

SEQ ID NO: 33140 - protein, 34 aa, Homo sapiens
  MAP TO AL021579.1; EXPRESSED IN HELA, SIGNAL = 1.9; EXPRESSED IN HEART, SIGNAL = 1.5; EXPRESSED IN BONE MARROW, SIGNAL = 1.7
SQHQLSQPQPQLPQSHLPLPQLQPQPQPLPQSQP

SEQ ID NO: 33141 - protein, 201 aa, Homo sapiens
  MAP TO AL136109.1; EXPRESSED IN BRAIN, SIGNAL = 1.2; EXPRESSED IN HELA, SIGNAL = 1.1; EXPRESSED IN BONE MARROW, SIGNAL = 0.9; SWISSPROT HIT: Q92618, EVALUE 1.00e-01
IEKSETTSEHTCQLCGGWFDTKIGLSNHVRGHLKRLGKTKWDAHKSPICVLNEMMQNEEKYEKILKALNSRRIIPRPFVAQKLASSDDFISQNVIPLEAYRNGLKTEALSVSASEEEGLNFLNEYDETKPELPSGKKNQSLTLIELLKNKRMGEERNSAISPQKIHNQTARKRFVQKCVLPLNEDSPLMYQPQKMDLTMHS

SEQ ID NO: 33142 - protein, 182 aa, Homo sapiens
  MAP TO AC005261.1; EXPRESSED IN LUNG, SIGNAL = 1.1; EXPRESSED IN BONE MARROW, SIGNAL =   1; EXPRESSED IN HELA, SIGNAL = 1.2; SWISSPROT HIT: O43296, EVALUE 1.00e-48
DSTKPETVEPIPSHLALPEEVSLQEQLAQGVPRYSYLGQAMDQDGPSEMQEYFLRPGTDPQSEKLHGKMSLEHEGLATADGICSMMIQNQVSPEDALYGFDSYGPVTDSLIHEGENSYKFEEMFNENCFLVQHEQILPRVKPYDCPECGKAFGKSKHLLQHHIIHTGEKPYKCLECGKDFNR

SEQ ID NO: 33143 - protein, 545 aa, Homo sapiens
  MAP TO AF205588.1; EXPRESSED IN HELA, SIGNAL = 0.57; EXPRESSED IN BRAIN, SIGNAL = 0.78; EXPRESSED IN BONE MARROW, SIGNAL = 0.9; SWISSPROT HIT: Q06730, EVALUE 0.00e+00
ISPSRDNHYEFSDCEKFLCVKSTLSKPHGVSMKHYDCGESGNNFRRKLCLSHLQKGDKGEKHFECNECGKAFWEKSHLTRHQRVHTGQKPFQCNECEKAFWDKSNLTKHQRSHTGEKPFECNECGKAFSHKSALTLHQRTHTGEKPYQCNACGKTFCQKSDLTKHQRTHTGLKPYECYECGKSFRVTSHLKVHQRTHTGEKPFECLECGKSFSEKSNLTQHQRIHIGDKSYECNACGKTFYHKSLLTRHQIIHTGWKPYECYECGKTFCLKSDLTVHQRTHTGQKPFACPECGKFFSHKSTLSQHYRTHTGEKPYECHECGKIFYNKSYLTKHNRTHTGEKPYECNECGKAFYQKSQLTQHQRIHIGEKPYKCNECGKAFCHKSALIVHQRTHTQEKPYKCNECGKSFCVKSGLIFHERKHTGEKPYECNECGKFFRHKSSLTVHHRAHTGEKSCQCNECGKIFYRKSELAQHQRSHTGEKPYECNTCRKTFSQKSNLIVHQRRHIGENLMNEMDIRNFQPQVSLHNASEYSHCGESPDDILNVQ

SEQ ID NO: 33144 - protein, 142 aa, Homo sapiens
  MAP TO AC001070.1; EXPRESSED IN BONE MARROW, SIGNAL = 5.9
SGDDRELRRRGGVRDLVLGSGDDLEPLRAVLDLGGCSGEDSVLLLPSGEGPLPLLDEPDLLRLGRARGAGALGSGEESEPLCALGAALGLSFTSGEEPDLLRRGDSRDLLSTSGDDPDRLLCRSGVRVLALESGEESDSLLS

SEQ ID NO: 33145 - protein, 40 aa, Homo sapiens
  MAP TO AC013591.3; EXPRESSED IN LUNG, SIGNAL = 1.5; EXPRESSED IN BONE MARROW, SIGNAL = 1.6; EXPRESSED IN FETAL LIVER, SIGNAL = 1.6; SWISSPROT HIT: Q9P2W7, EVALUE 9.00e-18
MQRNLALRWLRETFPRNSSQPGVVYFADDDNTYSLELFEE

SEQ ID NO: 33146 - protein, 118 aa, Homo sapiens
  MAP TO AL353998.3; EXPRESSED IN LUNG, SIGNAL = 0.94; EXPRESSED IN BONE MARROW, SIGNAL = 1.6; EXPRESSED IN HELA, SIGNAL = 0.5; EXPRESSED IN BRAIN, SIGNAL = 0.8; SWISSPROT HIT: P30647, EVALUE 2.00e-03
NPLFVEAEEKVSYNCCRQGTVCLQIQMERNTFTPGEKVVFTTEINNQTSKCIKTVVFALYAHIQYEGFTPSAERRSRLDSSELLRQEANTPVTRFNTTKVVSTFNLPLLLSVSSSTQD

SEQ ID NO: 33147 - protein, 83 aa, Homo sapiens
  MAP TO AL353998.3; EXPRESSED IN LUNG, SIGNAL = 0.94; EXPRESSED IN BONE MARROW, SIGNAL = 1.6; EXPRESSED IN HELA, SIGNAL = 0.5; EXPRESSED IN BRAIN, SIGNAL = 0.8
TPCSWRLRRKSPTTAAARALSVCKSRWKGTPSRQERRSSSQQRSTTRPANASRRSYSPCMPTYSTRASRPVQSGGLGWTAASF

SEQ ID NO: 33148 - protein, 209 aa, Homo sapiens
  MAP TO AF128525.1; EXPRESSED IN BRAIN, SIGNAL = 0.86; EXPRESSED IN HELA, SIGNAL = 1.8; EXPRESSED IN LUNG, SIGNAL = 1.1; EXPRESSED IN BONE MARROW, SIGNAL = 1.2; SWISSPROT HIT: P56715, EVALUE 1.00e-106
VSAKMSDTPSTGFSIIHPTSSEGQVPPPRHLSLTHPVVAKRISFYKSGDPQFGGVRVVVNPRSFKSFDALLDNLSRKVPLPFGVRNISTPRGRHSITRLEELEDGESYLCSHGRKVQPVDLDKARRRPRPWLSSRAISAHSPPHPVAVAAPGMPRPPRSLVVFRNGDPKTRRAVLLSRRVTQSFEAFLQHLTEVMQRPVVKLYATDGRR

SEQ ID NO: 33149 - protein, 26 aa, Homo sapiens
  MAP TO AC008888.4; EXPRESSED IN HELA, SIGNAL = 0.88; EXPRESSED IN BONE MARROW, SIGNAL = 0.76
YAAQTPKVPTVMMVWLHCVSSAKSLA

SEQ ID NO: 33150 - protein, 57 aa, Homo sapiens
  MAP TO AL118508.6; EXPRESSED IN LUNG, SIGNAL = 1.4; EXPRESSED IN BONE MARROW, SIGNAL = 0.83; EXPRESSED IN HELA, SIGNAL = 1.3
APWWPSYSCWPWLWGYWSIASGERRGRRRRRRSPRMRQTVTPGFQSELRAGPWRTST

SEQ ID NO: 33151 - protein, 645 aa, Homo sapiens [sequence omitted]

SEQ ID NO: 33152 - protein, 203 aa, Homo sapiens
  MAP TO AL161668.1; EXPRESSED IN HELA, SIGNAL = 1.7; EXPRESSED IN BONE MARROW, SIGNAL = 1.1; EXPRESSED IN LUNG, SIGNAL = 1.4; SWISSPROT HIT: P13889, EVALUE 6.10e+00
AHEWVDEGFARLAGAGPGREAVLAALALRRAPEPSAGTFQEMRALALDLGSPAALREWGRCQARCQELERRIQQHVGEEASPRGYRRRRADGASSGGAQWGPRSPSPSLSSLLLPSSPGPRPAPSHCSLAPCGEDYEEEGPELAPEAEGRPPRAVLIRGLEVTSTEVVDRTCSPREHVLLGRARGPDGPWGVGTPRMERKRSI

SEQ ID NO: 33153 - protein, 189 aa, Homo sapiens
  MAP TO AC002040.1; EXPRESSED IN LUNG, SIGNAL = 1.1; EXPRESSED IN BONE MARROW, SIGNAL = 0.84; EXPRESSED IN HEART, SIGNAL = 1.4; SWISSPROT HIT: Q60806, EVALUE 2.20e+00
GFSTRPFVRSVQRQSLSSRSSVTSPLAVNENCMRPSWSLSAKLQMRSNSPSRFSGDSPIHSSASTLEKIGEAADDKVSISCFGSLRNLSSSYQEPSDSHSLREHKAVGRAPLAVMEGVFKDESDTRRLNSSVVDTQSKHSAQGDRLPPLSGPFDNNNQIAYVDQSDSVDSSPVKEVKAPSHPGSLAKKP

SEQ ID NO: 33154 - protein, 208 aa, Homo sapiens
  MAP TO AF205588.1; EXPRESSED IN BONE MARROW, SIGNAL = 0.83; SWISSPROT HIT: P03341, EVALUE 2.00e-47
TQLRHRLEEVALLLPLTEAQIPLGNERSAPFLVYVPFSVSDLYNWKAHNPPFSEKPQVLTSLMESVLRNHRPTWDDCQQLLLTLFTSEERDHIRRKVRKYFLTSAGRPEEEARDLLEETFPSTWPDWDTKSSGGKRALDNFHWYVLVGIKGATQKPMNLSKTTEAVQGPNESPGVFLERLLEAYQIYTPFDPEAPENSRAINLAFVTQ

SEQ ID NO: 33155 - protein, 161 aa, Homo sapiens
  MAP TO AC004232.1; EXPRESSED IN BONE MARROW, SIGNAL = 0.92; EXPRESSED IN HELA, SIGNAL = 1.7; SWISSPROT HIT: O14978, EVALUE 3.00e-96
EEKFENLEGVPSVCSENIHPQVLLPDQARGEVPWSPELGRPHDRSQGDWAPPPEGGMEQALAGASSGRELGRPKELQPKKLHLCPLCGKNFSNNSNLIRHQRIHAAERLCMGVDCTEIFGGNPRFLSLHRAHLGEEAHKCLECGKCFSQNTHLTRHQRTHT

SEQ ID NO: 33156 - protein, 97 aa, Homo sapiens
  MAP TO AC004232.1; EXPRESSED IN BONE MARROW, SIGNAL = 0.92; EXPRESSED IN HELA, SIGNAL = 1.7; SWISSPROT HIT: Q51521, EVALUE 8.40e+00
EKRNLRTWKVFRLYALRTSTLRCCFLTRPEGRCPGVLSWEDLMTGRKGIGRLPQRVEWSRPWQEPQVAENWGDRRNCSQRNSIYVPCVAKISLTTQT

SEQ ID NO: 33157 - protein, 264 aa, Homo sapiens
  MAP TO Z98885.1; EXPRESSED IN HELA, SIGNAL = 1.4; EXPRESSED IN BONE MARROW, SIGNAL = 1.2; SWISSPROT HIT: Q95237, EVALUE 3.40e-01
MECCVAVCFVALDAGTHALLLTEVACQFPPGWRDVPHPIDGLDEHRVGKADLWDPQGTHHVTPAVVICLFEGTTLVGAQHTVGGPGPRLQAVAAEPLALGDVGHPVALLVHGQVAHVAEEDHVAVLTLPVHADAAHGVLVDQRLLLALLLVLAVRLLLEAVHQELKHALRHGGDAVALALLIDDLQPGIVLLVHVILHLVVQFLGRLLDELVVHRRPPGGGRRAVLHDAHLGLREGTGRGRRAVGAGEGLVFLFDSVVFVTLSS

SEQ ID NO: 33158 - protein, 205 aa, Homo sapiens
  MAP TO AL031985.10; EXPRESSED IN BONE MARROW, SIGNAL = 1.2; EXPRESSED IN LUNG, SIGNAL = 1.6; SWISSPROT HIT: Q99676, EVALUE 4.00e-32
LKSKTKTKESALQNDISWEELHCGLMMERFTKGSSMYSTLGRISKCNKLESQQENQRMGKGQIPLMCKKTFTQERGQESNRFEKRINVKSEVMPGPIGLPRKRDRKYDTPGKRSRYNIDLVNHSRSYTKMKTFECNICEKIFKQLIHLTEHMRIHTGEKPFRCKECGKAFSQSSSLIPHQRIHTGEKPYECKECGKTFRHPSSLT

SEQ ID NO: 33159 - protein, 208 aa, Homo sapiens
  MAP TO AP000512.1; EXPRESSED IN BONE MARROW, SIGNAL = 0.75; SWISSPROT HIT: O60231, EVALUE 2.00e-19
LKSSRVMNLITQSWVRTPFEGPRSVILSICPSFLVFSICLFLLFSCLVFTTSFSEMYLVPGCIFSKGQTSSFFFVIQGYTNKGMKIACTQPRRVAAMSVAARVAREMGVKLGNEVRFLGNRGVESGVCDSVYSSLRSLQQKSWCCPTSPFPKFLSGHTSPHLVANGSLDQVGYSIRFEDCTSERTVLRYMTDGMLLREFLSEPDLASY

SEQ ID NO: 33160 - protein, 27 aa, Homo sapiens
  MAP TO AP000512.1; EXPRESSED IN BONE MARROW, SIGNAL = 0.75; SWISSPROT HIT: P17965, EVALUE 1.80e+00
CLHPTPESGCHECGRPSGPGDGCEAWE

SEQ ID NO: 33161 - protein, 77 aa, Homo sapiens
  MAP TO AC068323.6; EXPRESSED IN BRAIN, SIGNAL = 0.82; EXPRESSED IN HELA, SIGNAL = 0.98; EXPRESSED IN BONE MARROW, SIGNAL = 0.92; SWISSPROT HIT: P57552, EVALUE 3.90e+00
GSPGPGGQLAETNLQVTVMVPFNDDPFGVFILDPECLEREVAEDVLSEDDMSYITNFTILRQQGVFGDVQLGWEILS

SEQ ID NO: 33162 - protein, 100 aa, Homo sapiens
  MAP TO AC068323.6; EXPRESSED IN BRAIN, SIGNAL = 0.82; EXPRESSED IN HELA, SIGNAL = 0.98; EXPRESSED IN BONE MARROW, SIGNAL = 0.92; SWISSPROT HIT: P39060, EVALUE 2.60e+00
WVMPNANTNGFIIAKDDGNGSIYYGVKIQTNESHVTLSLHYKTLGSNATYIAKTTVMKYLEESVWLHLLIILEDGIIEFYLDGNAMPRGIKSLKGEAITD

SEQ ID NO: 33163 - protein, 254 aa, Homo sapiens
  MAP TO AC005565.1; EXPRESSED IN LUNG, SIGNAL = 0.95; EXPRESSED IN BRAIN, SIGNAL = 1.2; EXPRESSED IN HEART, SIGNAL = 1.2; EXPRESSED IN BONE MARROW, SIGNAL = 0.9; SWISSPROT HIT: P17024, EVALUE 4.80e-02
ASTTANCECGQVHRFTRAMLIHASTTANRECGQVHRFTRAMLMGPSTTASRECGQVHRFTRAMLVGPSTTASCECGQVHRFTRAMLMGPSTTANRECGQVHRFTWAMLIHTSTMANRECGQVHRFTRAMLIQASTTANRECGQVHRFTRAMLIQASTTANRECGQVHRFTRAMLMGPSTTANRECGQVHRFTWAMLIHTSTMANRECGQVHRFTRAMLIQASTMANRECGQVHRFTRAMLIQASTTANREHRQV

SEQ ID NO: 33164 - protein, 249 aa, Homo sapiens
  MAP TO AC005565.1; EXPRESSED IN LUNG, SIGNAL = 0.95; EXPRESSED IN BRAIN, SIGNAL = 1.2; EXPRESSED IN HEART, SIGNAL = 1.2; EXPRESSED IN BONE MARROW, SIGNAL = 0.9; SWISSPROT HIT: P98164, EVALUE 3.50e+00
LLRRPTASAGRFTDSHGLCLSTLLRRPTASAGRFTDSPGLCLWGLLRRPAASAGRFTDSHGLCLWGLLRRPAASAGRFTDSHGLCLWGLLRRPTANAGRFTDSHGLCLSTLLRWPTASAGRFTDSHGLCLSRLLRRPTASAGRFTDSHGLCLSRLLQRPTASAGRFTDSHGLCLWGLLRRPTANAGRFTDSHGLCLSTLLRWPTASAGRFTDSHGLCLSRLLRWPTASAGRFTDSHGLCLSRLLRRPTV

SEQ ID NO: 33165 - protein, 217 aa, Homo sapiens
  MAP TO AC006369.3; EXPRESSED IN BONE MARROW, SIGNAL = 1.3; EXPRESSED IN LUNG, SIGNAL = 1.5; EXPRESSED IN HEART, SIGNAL =   2; SWISSPROT HIT: Q00587, EVALUE 1.00e-03
FRHTIHIGKEGQHDVFGDISFLQGNYELLPGNQEKAHLGQFPGHNEFFRANSTSDSVFTETPSPVLKNAISLPTIGGSQALMLPLLSPVTFNSKQESFGPAKLPRLSCEPVMEEKAQEKSSLLENGTVHQGDTSWGSSGSASQSSQGRDSHSSSLSEQYPDWPAEDMFDHPTPCELIKGKTKSEESLSDLTGSLLSLQLDLGPSLLDEVLNVMDKNK

SEQ ID NO: 33166 - protein, 152 aa, Homo sapiens
  MAP TO AC006057.5; EXPRESSED IN HELA, SIGNAL = 1.2; EXPRESSED IN BONE MARROW, SIGNAL = 0.77; SWISSPROT HIT: P51957, EVALUE 9.10e+00
NDETFACVSQGRKHTPLLGRERFEITEVLLPSSSVFALNPESGQDVIRDQTPITPSNTLVSAGGSGNMGGDGGLRAGPEGNEGQPDIKWWWPLNLGLGFSRSGWGRVHGRRVRSSPESLSTSGDCDGEVSMPVRAPGEARDKVLLIPALMGT

SEQ ID NO: 33167 - protein, 27 aa, Homo sapiens
  MAP TO AL121935.12; EXPRESSED IN HELA, SIGNAL = 1.1; EXPRESSED IN BONE MARROW, SIGNAL = 0.87
GVEDPPIGAPEGGAGEAVYHGVEHTVQ

SEQ ID NO: 33168 - protein, 196 aa, Homo sapiens
  MAP TO AL121935.12; EXPRESSED IN HELA, SIGNAL = 1.1; EXPRESSED IN BONE MARROW, SIGNAL = 0.87; SWISSPROT HIT: Q99575, EVALUE 2.90e-01
SPDDACIAEHDEAKGEDKLKAGECFLPDDAEGAVCPGVETVAPGGVLGGLRDEQARAGEGDHQEPDEARDPQGRLRRQQVDLKPRVDHTEVPVQSHGGQEGHPHAAAEVQQEVQGPAAHTAQMPSLEAQVEGGQERQARSQQQVSQGQVEQVDSVRLPHPDPEQEGPQRHRVAQQTQPTLQPQQDTHSCGHHSAGG

SEQ ID NO: 33169 - protein, 239 aa, Homo sapiens
  MAP TO AC004531.1; EXPRESSED IN BONE MARROW, SIGNAL = 0.85; SWISSPROT HIT: Q11039, EVALUE 9.00e-11
RPVRLFSLVTRLLLAPRRGLTVRSPDEPLPVVRIPVALQRQLEQRQSRRRNLPRPVLVRPGPLLVSARRPELNQPARLTLGRWERAPLASQGWKSRRARRDHFSIERAQQEAPAVRKLSSKGSFADLGLEPRVLHALQEAAPEVVQPTTVQSSTIPSLLRGRHVVCAAETGSGKTLSYLLPLLQRLLGQPSLDSLPIPAPRGLVLVPSRELAQQVRAVAQPLGRSLGLLVRDLEGGHGM

SEQ ID NO: 33170 - protein, 170 aa, Homo sapiens
  MAP TO AC007498.2; EXPRESSED IN BONE MARROW, SIGNAL = 0.79
MNDTVNKTDQVDCSDLSEHNGLDREESMEVEAPVANKSGSGTSSGSHSSTAPSSSSSSSSSSGGGGSSSTGTSAITTSLPQLGDLTTLGNFSVINSNVIIENLQSTKVAVAQFSQEARCGGASGGKLAVPALMEQLLALQQQQIHQLQLIEQIRHQILLLASQNADLPTS

SEQ ID NO: 33171 - protein, 21 aa, Homo sapiens
  MAP TO AC007498.2; EXPRESSED IN BONE MARROW, SIGNAL = 0.79
RWPSSPRKRGAAGPLGASWPS

SEQ ID NO: 33172 - protein, 32 aa, Homo sapiens
  MAP TO AC007498.2; EXPRESSED IN BONE MARROW, SIGNAL = 0.79
RARMPTSVAGAVPSSLNYQIFCSTRRTVLKIN

SEQ ID NO: 33173 - protein, 188 aa, Homo sapiens
  MAP TO AC004590.1; EXPRESSED IN BONE MARROW, SIGNAL = 0.85; SWISSPROT HIT: P47160, EVALUE 4.00e-34
MTTSALRRQVKNIVHNYSEAEIKVREATSNDPWGPPSSLMSEIADLTFNTVAFTEVMGMLWRRLNDSGKNWRHVYKALTLLDYLLKTGSERVAHQCRENLYTIQTLKDFQYIDRDGKDQGVNVREKVKQVMALLKDEERLRQERTHALKTKERMALEGIGIGSGQLGFSRRYGEDYSRSRGSPSSYNC

SEQ ID NO: 33174 - protein, 60 aa, Homo sapiens
  MAP TO AC006486.1; EXPRESSED IN BONE MARROW, SIGNAL = 0.95; SWISSPROT HIT: P52701, EVALUE 6.10e+00
AGRAGPRPWQPVRAARSLTGVMRRRGTVRPAVWRLVETHGHAWWPLLTCHALSSTSVRRP

SEQ ID NO: 33175 - protein, 93 aa, Homo sapiens
  MAP TO AC012313.5; EXPRESSED IN BONE MARROW, SIGNAL = 0.84; SWISSPROT HIT: O31066, EVALUE 7.40e+00
MRHSTGEAGGRIGPEPGLPSPSSSSSSSWSSPLLGERGAESEPGELGPEPWGAREWRSQNGRGQGIRMDLGGEEVRQGRRRWSLERVLRPAGN

SEQ ID NO: 33176 - protein, 38 aa, Homo sapiens; identical to SEQ ID NO: 27888
  MAP TO AP001748.1; EXPRESSED IN BONE MARROW, SIGNAL = 1.4; SWISSPROT HIT: Q47879, EVALUE 6.50e+00

SEQ ID NO: 33177 - protein, 42 aa, Homo sapiens; identical to SEQ ID NO: 27889
  MAP TO AP001748.1; EXPRESSED IN BONE MARROW, SIGNAL = 1.4

SEQ ID NO: 33178 - protein, 17 aa, Homo sapiens
  MAP TO AP001748.1; EXPRESSED IN BONE MARROW, SIGNAL = 1.4
CSGTKGEGQAPSHPDSS

SEQ ID NO: 33179 - protein, 322 aa, Homo sapiens
  MAP TO AC018432.4; EXPRESSED IN BONE MARROW, SIGNAL = 0.86; SWISSPROT HIT: P14105, EVALUE 1.20e-02
IHPLQIENKKEFKTADWKTRADPKTFALPKKQQELCVSGTIWSYPNPYTSISPKIIRHKDKAKTADVESTMHTKQIKLKAKRITVSQLLEYGTASNKKELRGNIQQQKSFQLSKNAVHRVLKAVYDSGYCVSSIKKLTEVKMEKDKPKDRTCILPQPKLEKPLKEMQRSLSGCTDMSSILRKQEQDIREKEQKHQSISEDISQYYIGPLRISSQQINYSSFDAPRIRTDEELEFLIAQRAKEKDVGIAKHSVSIPWEREGSKRLDIPLNSKGQNIFFTELDTSQQKTCQEQELLKQEDISMTNLGSMACPIMEPLHLENTGK

SEQ ID NO: 33180 - protein, 47 aa, Homo sapiens
  MAP TO AP000353.1; EXPRESSED IN HELA, SIGNAL = 1.1; EXPRESSED IN BONE MARROW, SIGNAL = 0.84
GEQGIKARGPVVCGSLGTQEHGTPCTACLEEAREAASSTSSEVVCDG

SEQ ID NO: 33181 - protein, 80 aa, Homo sapiens
  MAP TO AL022312.7; EXPRESSED IN HELA, SIGNAL = 1.3; EXPRESSED IN BONE MARROW, SIGNAL = 0.99; SWISSPROT HIT: O60504, EVALUE 8.90e-02
SPCAPLSPLQTHPHQLIPAPCRLPEDFPTEWPASAWESWFPKLGSTPARTPPLLHWSLVHSGHQLLIPRGSFHNVFVFVF

SEQ ID NO: 33182 - protein, 49 aa, Homo sapiens
  MAP TO AL022319.2; EXPRESSED IN HELA, SIGNAL = 1.4; EXPRESSED IN BRAIN, SIGNAL = 0.9; EXPRESSED IN BONE MARROW, SIGNAL =   1; EXPRESSED IN FETAL LIVER, SIGNAL =   1; EXPRESSED IN LUNG, SIGNAL = 1.1
GEGNNRQGQPSRIGTRSEAGTGCLQSPEEENNSPCLPNASEGFLGKVTS

SEQ ID NO: 33183 - protein, 42 aa, Homo sapiens
  MAP TO AL079300.11; EXPRESSED IN BRAIN, SIGNAL = 0.82; EXPRESSED IN HELA, SIGNAL = 1.1; EXPRESSED IN LUNG, SIGNAL = 0.95; EXPRESSED IN BONE MARROW, SIGNAL =   1; EXPRESSED IN FETAL LIVER, SIGNAL = 1.1; SWISSPROT HIT: P92172, EVALUE 4.90e+00
PLCFRDCNSLNVCLLKFHVEFDPQNWRWGPMGSVRVKETDSP

SEQ ID NO: 33184 - protein, 44 aa, Homo sapiens
  MAP TO AC007262.4; EXPRESSED IN HELA, SIGNAL = 1.4; EXPRESSED IN BRAIN, SIGNAL = 1.1; EXPRESSED IN FETAL LIVER, SIGNAL = 1.1; EXPRESSED IN BONE MARROW, SIGNAL =   1; SWISSPROT HIT: O69161, EVALUE 3.70e+00
PSEQLPTDLYRNLERNRPHHHLCQPAHIARVLRRCYPSHKRRVL

SEQ ID NO: 33185 - protein, 68 aa, Homo sapiens
  MAP TO AC008166.1; EXPRESSED IN LUNG, SIGNAL = 1.2; EXPRESSED IN FETAL LIVER, SIGNAL = 1.3; EXPRESSED IN BONE MARROW, SIGNAL = 1.2; EXPRESSED IN BRAIN, SIGNAL = 1.1; EXPRESSED IN HELA, SIGNAL = 1.7; SWISSPROT HIT: P30547, EVALUE 8.90e-01
SLPFSIFTILPFFNPKCTCKSFYPYYFQAIFILSGKHINSILCITGMPQVLFLISKVSYKFTTSALCL

SEQ ID NO: 33186 - protein, 48 aa, Homo sapiens
  MAP TO AL049758.11; EXPRESSED IN LUNG, SIGNAL = 1.3; EXPRESSED IN BONE MARROW, SIGNAL = 1.2; EXPRESSED IN FETAL LIVER, SIGNAL = 1.4; EXPRESSED IN BRAIN, SIGNAL = 1.2
LACQSLLFQADLAALGQRFFSNHTGPKANTECCSLSNALLSDNWLIKV

SEQ ID NO: 33187 - protein, 53 aa, Homo sapiens
  MAP TO AC006427.13; EXPRESSED IN HEART, SIGNAL = 1.7; EXPRESSED IN BONE MARROW, SIGNAL = 1.7; EXPRESSED IN FETAL LIVER, SIGNAL = 1.4; EXPRESSED IN HELA, SIGNAL = 1.3; EXPRESSED IN BRAIN, SIGNAL = 1.3; SWISSPROT HIT: O84074, EVALUE 1.30e+00
TILMPFQGYLTFPFRSAVLSSWISFQFNPILTPMLKLFFPIMPTNRSKSYHLA

SEQ ID NO: 33188 - protein, 152 aa, Homo sapiens
  MAP TO AL031587.3; EXPRESSED IN BONE MARROW, SIGNAL = 0.98; EXPRESSED IN HELA, SIGNAL = 0.97; SWISSPROT HIT: Q03376, EVALUE 3.30e+00
PWPLPVELRSHHLCTPRGLSSSRRVHSCQLGCLSQCPSGHRWENRLSVGRCLCPCPQPLTPHPSTLAAHLLPPLSRRWCCCPCLCRSSLRGGCAGEGGGVYMHIYTRMHTCAHTFPPWGGQRNTQSPSYRRQSEFKNSSSSAVCLWGRYKYF

SEQ ID NO: 33189 - protein, 76 aa, Homo sapiens
  MAP TO AC007719.1; EXPRESSED IN HELA, SIGNAL = 0.44; EXPRESSED IN BONE MARROW, SIGNAL = 0.76; SWISSPROT HIT: P15604, EVALUE 1.80e+00
KHFSYHTQLETIFVPTFLALYLFVFNGIYHSLLCGTVIFEHFLLSRLDCRFLAFQVFLESVKGQKAAYGVIALGVI

SEQ ID NO: 33190 - protein, 52 aa, Homo sapiens
  MAP TO AC008166.1; EXPRESSED IN LUNG, SIGNAL = 1.1; EXPRESSED IN BONE MARROW, SIGNAL = 0.89; EXPRESSED IN FETAL LIVER, SIGNAL =   1; EXPRESSED IN HELA, SIGNAL = 1.5
LSLPASICIRCDLLLLAFLHDCEASPAIWKCKSNKPLSFVSCPVLGMSLSAA

SEQ ID NO: 33191 - protein, 21 aa, Homo sapiens
  MAP TO AC008283.3; EXPRESSED IN PLACENTA, SIGNAL = 2.2; EXPRESSED IN BRAIN, SIGNAL = 2.9; EXPRESSED IN BONE MARROW, SIGNAL = 2.2; EXPRESSED IN FETAL LIVER, SIGNAL = 2.6; EXPRESSED IN LUNG, SIGNAL = 3.3
PYQLRGVVLRLNIKLKVVHLK

SEQ ID NO: 33192 - protein, 65 aa, Homo sapiens
  MAP TO AP000053.1; EXPRESSED IN HELA, SIGNAL = 2.4; EXPRESSED IN BONE MARROW, SIGNAL = 1.3; EXPRESSED IN FETAL LIVER, SIGNAL = 1.2; EXPRESSED IN LUNG, SIGNAL = 1.2; SWISSPROT HIT: Q08210, EVALUE 8.70e-01
GFIRGFPHFALYFSFLPSCEEGYACFLFCHDCKFPEASSAMRNCESIKHLSFINYPVSGMSLLTA

SEQ ID NO: 33193 - protein, 67 aa, Homo sapiens
  MAP TO AP000347.1; EXPRESSED IN HELA, SIGNAL = 1.7; EXPRESSED IN PLACENTA, SIGNAL = 2.9; EXPRESSED IN BRAIN, SIGNAL = 2.9; EXPRESSED IN HEART, SIGNAL =   3; EXPRESSED IN LUNG, SIGNAL =   3; EXPRESSED IN BONE MARROW, SIGNAL = 3.4; EXPRESSED IN FETAL LIVER, SIGNAL = 2.3; SWISSPROT HIT: P36440, EVALUE 3.20e+00
LPHPISRASCPHAPTCPWTDTPLFLLAQGRHGGNFSSPLLVGKSKPNKITTRHLVQCPSKLTLFSDP

SEQ ID NO: 33194 - protein, 23 aa, Homo sapiens
  MAP TO Z82201.1; EXPRESSED IN BONE MARROW, SIGNAL = 0.85; EXPRESSED IN HELA, SIGNAL = 0.76
LSLGLVAPQHPGKPSRVCGARTL

SEQ ID NO: 33195 - protein, 156 aa, Homo sapiens
  MAP TO Z83840.7; EXPRESSED IN LUNG, SIGNAL = 0.93; EXPRESSED IN HELA, SIGNAL = 1.3; EXPRESSED IN BRAIN, SIGNAL =   1; EXPRESSED IN BONE MARROW, SIGNAL = 0.88; SWISSPROT HIT: P38996, EVALUE 2.70e-01
SGGLGEKTGGLERRNRLLKSKDNGKTRLSEWKNQEQGGGGNDEEIQIQGKRNLRGTTADDGTETQAPAGDDQGQLRVEIAEEIQVQGQGNKNDGGVEDVAELQDIGSQRKCTDEDVGEPRAPRGGNKDLVRGEDAVRDSLQVDCSGSERPTGRKHS

SEQ ID NO: 33196 - protein, 68 aa, Homo sapiens
  MAP TO AC008272.1; EXPRESSED IN BRAIN, SIGNAL = 1.9; EXPRESSED IN PLACENTA, SIGNAL =   2; EXPRESSED IN LUNG, SIGNAL = 2.1; EXPRESSED IN HEART, SIGNAL = 1.8; EXPRESSED IN BONE MARROW, SIGNAL = 1.8; EXPRESSED IN FETAL LIVER, SIGNAL = 1.7
SSCMFQAIHTGCLCTALCFYGVLSLSAQHTATYPRLLYSSPTSSPSPVCLPLVELIIFFCTLFPLYLG

SEQ ID NO: 33197 - protein, 18 aa, Homo sapiens
  MAP TO AC008283.3; EXPRESSED IN BONE MARROW, SIGNAL = 1.6
RTKVPSPWAMDRSGSLTC

SEQ ID NO: 33198 - protein, 63 aa, Homo sapiens
  MAP TO AC009266.1; EXPRESSED IN BRAIN, SIGNAL = 0.96; EXPRESSED IN HELA, SIGNAL = 1.5; EXPRESSED IN BONE MARROW, SIGNAL = 1.1; SWISSPROT HIT: O14628, EVALUE 6.00e-03
RSSDLPASASQSGRITGLSHHTWPGPIYKLIVTVFAKPSKEVSSMNLVRKGGKTTQCHGGGTM

SEQ ID NO: 33199 - protein, 36 aa, Homo sapiens
  MAP TO AL021707.2; EXPRESSED IN HELA, SIGNAL = 0.5; EXPRESSED IN HEART, SIGNAL = 1.2; EXPRESSED IN BONE MARROW, SIGNAL = 0.82
GKSPKMNPSFLSSSLIRLLQDCSYISQSTKPLRYSP

SEQ ID NO: 33200 - protein, 181 aa, Homo sapiens
  MAP TO AC004032.7; EXPRESSED IN BRAIN, SIGNAL = 1.3; EXPRESSED IN HEART, SIGNAL = 1.5; EXPRESSED IN BONE MARROW, SIGNAL = 1.4; EXPRESSED IN LUNG, SIGNAL = 1.3; EXPRESSED IN HELA, SIGNAL = 0.52; SWISSPROT HIT: P48552, EVALUE 1.90e-01
ARKDCRTVFKDSYGQKEPPHTPCPGSRPRAETDTPALSPPKSTPQLFFMAQILADLPASSYYPVTPALNTTALHLVIILQRFSLPPAHPAAITRPTLDSVFQTSPSTMETVSSIKGRREPGAGAKKSNCVNNSTHSVSLTGFNNDSGHHSWSKELLYITSALRTSVLGNGGNNRTGRDGGS

SEQ ID NO: 33201 - protein, 50 aa, Homo sapiens
  MAP TO AC004624.6; EXPRESSED IN HELA, SIGNAL = 0.66; EXPRESSED IN BRAIN, SIGNAL = 0.79; EXPRESSED IN BONE MARROW, SIGNAL = 0.74; EXPRESSED IN FETAL LIVER, SIGNAL = 0.92
VSRNLVFSKEYCKTYIFFSQREGIQTCITVIFFPSRNIKINVLKFIYGKL

SEQ ID NO: 33202 - protein, 277 aa, Homo sapiens
  MAP TO AP000344.1; EXPRESSED IN PLACENTA, SIGNAL = 1.8; EXPRESSED IN BRAIN, SIGNAL = 0.87; EXPRESSED IN HEART, SIGNAL = 1.2; EXPRESSED IN BONE MARROW, SIGNAL = 0.82; SWISSPROT HIT: P09593, EVALUE 8.00e-22
WAPGPTADKRGSLTGGRACISGPPHPASPASHCPKRGAPRNVTPSSMGLAWVGGEKAQRLLTSSPVLIRLHLERVVLSSLGPGGEDPTARQGSGGEDPTARWGSEGENPTTGPGSGGEDPTARRGPGGEDPTARRGPGGEDPTARWGSGGENPTARRGPGGEDPTARRGPGGEDPTPRPGPGGEDPTPRRGPGGEDSTARRGPGGEDPTPGPGSGGEDPTARRGPGGEDPTPGPGPRGEDPTARRGSGGEDPTARPGSGGEDPTATRGSGGEDPTPG

SEQ ID NO: 33203 - protein, 35 aa, Homo sapiens
  MAP TO AC009290.1; EXPRESSED IN BRAIN, SIGNAL = 0.85; EXPRESSED IN HELA, SIGNAL = 1.7; EXPRESSED IN LUNG, SIGNAL = 0.94; EXPRESSED IN BONE MARROW, SIGNAL = 0.97; SWISSPROT HIT: P51517, EVALUE 2.90e+00
HCAGQIDSIWPLAVSPNTARIFQNKYPPSHIITFC

SEQ ID NO: 33204 - protein, 313 aa, Homo sapiens
  MAP TO AB016897.1; EXPRESSED IN HELA, SIGNAL = 1.4; EXPRESSED IN BRAIN, SIGNAL = 0.87; EXPRESSED IN LUNG, SIGNAL = 0.97; EXPRESSED IN BONE MARROW, SIGNAL = 0.97; EXPRESSED IN FETAL LIVER, SIGNAL =   1
VGGGRRDPPQRLHAEAWENRVGWRLSLDGSQLWTQTSHVTCPLSSRLPGPRGGGPALSSHPWTSLVISSPLPPGTSYPLPPPPSHTGAFSPLPPGTSSPLPPGASSPLPPGTSSPPIRGLAVPSHPGPLLPSHPGPPLPSHPGPLLPSHPGPPLPSHPGPLLPSHPGPPLPSHPGPLLPSHPGPPLPSHPGPLLPSHPGPPLPSHPGPLLPSHPGPPLPSHPGPLLPSHPGPPLPSHPGPLLPSHPGPPLPSHPGPLLPSHPGPPLPSHPGPLLPSHPGPPLPSHPGPLLPSHPGPAVPSHPGPLLPSHPGPP

SEQ ID NO: 33205 - protein, 29 aa, Homo sapiens
  MAP TO AC007262.4; EXPRESSED IN BRAIN, SIGNAL =   1; EXPRESSED IN HELA, SIGNAL = 2.5; EXPRESSED IN BONE MARROW, SIGNAL = 1.2; EXPRESSED IN LUNG, SIGNAL = 0.94
FQKLEWRRKVLQEPGEVWQVKDILEILIK

SEQ ID NO: 33206 - protein, 26 aa, Homo sapiens
  MAP TO AC007556.2; EXPRESSED IN HELA, SIGNAL = 0.83; EXPRESSED IN BONE MARROW, SIGNAL = 0.8; EXPRESSED IN FETAL LIVER, SIGNAL = 0.98
PGISQGNSKPAAIDSLTSAHHRILCF

SEQ ID NO: 33207 - protein, 126 aa, Homo sapiens
  MAP TO AP000346.1; EXPRESSED IN BRAIN, SIGNAL = 0.86; EXPRESSED IN HELA, SIGNAL = 1.5; EXPRESSED IN BONE MARROW, SIGNAL = 0.89; SWISSPROT HIT: P81132, EVALUE 8.10e-01
PSSLFASGAARSSAHLSLKAMNTPFLTPSAATFSPSPLEALPGTFFPFLLGLKPSSPKTCFPSLGILLCGAAFLPPCPSCLHWSGTGPYEPSPMPVLRSPLVLNPCTSSVALAVSPPQHHTTRLLL

SEQ ID NO: 33208 - protein, 38 aa, Homo sapiens
  MAP TO AL035701.13; EXPRESSED IN PLACENTA, SIGNAL = 1.6; EXPRESSED IN BRAIN, SIGNAL = 0.99; EXPRESSED IN HELA, SIGNAL = 1.2; EXPRESSED IN BONE MARROW, SIGNAL = 0.9; EXPRESSED IN FETAL LIVER, SIGNAL =   1; SWISSPROT HIT: O67545, EVALUE 8.50e+00
LMRKRIVYCMYSSVCCSHFSIFLTDTLRFFFYYHFLYV

SEQ ID NO: 33209 - protein, 34 aa, Homo sapiens
  MAP TO AC007282.2; EXPRESSED IN FETAL LIVER, SIGNAL = 0.94; EXPRESSED IN HELA, SIGNAL = 2.2; EXPRESSED IN BONE MARROW, SIGNAL = 0.96; SWISSPROT HIT: P11205, EVALUE 6.60e+00
HIPRSTSDLMNLNLETEPGNLYFSKKKKKNQGDS

SEQ ID NO: 33210 - protein, 27 aa, Homo sapiens
  MAP TO AP000344.1; EXPRESSED IN BRAIN, SIGNAL =   1; EXPRESSED IN BONE MARROW, SIGNAL = 1.1; EXPRESSED IN LUNG, SIGNAL =   1; EXPRESSED IN HELA, SIGNAL = 1.1; EXPRESSED IN PLACENTA, SIGNAL = 1.4
SPGPDVVLNSSMCSFLPKSQNRNLKKP

SEQ ID NO: 33211 - protein, 41 aa, Homo sapiens
  MAP TO AC007462.2; EXPRESSED IN BRAIN, SIGNAL = 0.8; EXPRESSED IN HELA, SIGNAL = 0.9; EXPRESSED IN BONE MARROW, SIGNAL = 0.85
CYTEYQKPAPSENTYLTKDVRLWALMCPGVFQIPAEGPPSI

SEQ ID NO: 33212 - protein, 162 aa, Homo sapiens
  MAP TO AP000353.1; EXPRESSED IN HELA, SIGNAL = 1.5; EXPRESSED IN BONE MARROW, SIGNAL = 0.75; SWISSPROT HIT: O02755, EVALUE 6.00e-03
PPPGVTTNSIQSEAGLSPACFLHEVAGDAPSPGSLSMYAVGWRTVAASWGGEAANTAQGSLGSLRRWRRTTPPSTEVPPPHHALACSGKHCPAASAPWLGAVAGRISSKSSGDQRPGSLAQECPESGHRAQASGHGGPPEQLFVGASCGAWHGGTDLEAAGG

SEQ ID NO: 33213 - protein, 44 aa, Homo sapiens
  MAP TO AC007539.8; EXPRESSED IN HELA, SIGNAL = 1.1; EXPRESSED IN BRAIN, SIGNAL = 0.98; EXPRESSED IN LUNG, SIGNAL = 0.98; EXPRESSED IN BONE MARROW, SIGNAL = 0.75
LRTSPLGCHEIMEAERLSILRSIHFIGAFNVDFVAVANYMHMTF

SEQ ID NO: 33214 - protein, 168 aa, Homo sapiens
  MAP TO AL022319.2; EXPRESSED IN HELA, SIGNAL =   2; EXPRESSED IN BONE MARROW, SIGNAL = 1.1; EXPRESSED IN FETAL LIVER, SIGNAL =   1; EXPRESSED IN LUNG, SIGNAL = 1.1; SWISSPROT HIT: P15979, EVALUE 8.30e+00
AEGSELRIWGKTADGLYTLCPPLRGCLVPEKVEQGRGRGFGQTGPSLHRCQGACPPPLYGAQQTAQGPGSPLSPQPGPCGLGQVCAFVIDTSLRPWPQTTGLGRKEGPFAQPSPMLTCPGQWITASLVLISVTHRNKVKCLGSAGGASRSLGRARPSPSAPCKELLCL

SEQ ID NO: 33215 - protein, 71 aa, Homo sapiens
  MAP TO AP000127.1; EXPRESSED IN BRAIN, SIGNAL = 1.5; EXPRESSED IN HELA, SIGNAL = 3.9; EXPRESSED IN BONE MARROW, SIGNAL = 1.3; EXPRESSED IN FETAL LIVER, SIGNAL = 1.6; EXPRESSED IN LUNG, SIGNAL = 1.6
YFDDERSCYLFIVISCYLFITFLVNCPLMAMPNFLFRHLFFLLICNKPLHIKHTSSFTGITIFFSSTTLAF

SEQ ID NO: 33216 - protein, 27 aa, Homo sapiens
  MAP TO AL031652.1; EXPRESSED IN BONE MARROW, SIGNAL = 1.1; EXPRESSED IN FETAL LIVER, SIGNAL = 1.1; EXPRESSED IN HELA, SIGNAL = 0.7; EXPRESSED IN BRAIN, SIGNAL = 0.77
VVLLGSYLTYEDYNGTVPFFPNRSKRL

SEQ ID NO: 33217 - protein, 80 aa, Homo sapiens
  MAP TO AC007281.3; EXPRESSED IN BONE MARROW, SIGNAL = 0.83; EXPRESSED IN HELA, SIGNAL = 2.1; SWISSPROT HIT: Q9FDF6, EVALUE 2.60e+00
SFSDSGYLRGCLSYFQKGFATWGQKLEGIFSSKIMPKVQGFLSMILVVPGPAPGMIPVCIHFRCSQESLDLVQAHIFLSV

SEQ ID NO: 33218 - protein, 20 aa, Homo sapiens
  MAP TO AC007253.2; EXPRESSED IN HELA, SIGNAL = 1.7; EXPRESSED IN BONE MARROW, SIGNAL = 1.1; EXPRESSED IN FETAL LIVER, SIGNAL = 1.4
SNYPQSINRLLLTCSILTGT

SEQ ID NO: 33219 - protein, 56 aa, Homo sapiens
  MAP TO AC002472.3; EXPRESSED IN HEART, SIGNAL = 1.3; EXPRESSED IN BONE MARROW, SIGNAL = 1.2; EXPRESSED IN LUNG, SIGNAL =   1; EXPRESSED IN HELA, SIGNAL = 1.8; EXPRESSED IN BRAIN, SIGNAL = 1.4; SWISSPROT HIT: O34450, EVALUE 8.00e+00
CFFQGCIYSEEGHFHILSMCHPLEAVLRTMSAGSHLILTTTREVSARNLTDGETEA

SEQ ID NO: 33220 - protein, 48 aa, Homo sapiens
  MAP TO AL031588.1; EXPRESSED IN FETAL LIVER, SIGNAL = 0.99; EXPRESSED IN LUNG, SIGNAL = 1.1; EXPRESSED IN BONE MARROW, SIGNAL = 1.1; SWISSPROT HIT: P81122, EVALUE 8.20e+00
QGNCSTLGRARPRPPHRAFYNSPAKWKGRQELWSSLPELKRHSSRHFR

SEQ ID NO: 33221 - protein, 109 aa, Homo sapiens
  MAP TO AL034562.2; EXPRESSED IN HELA, SIGNAL = 0.56; EXPRESSED IN BRAIN, SIGNAL =   2; EXPRESSED IN BONE MARROW, SIGNAL = 0.92; SWISSPROT HIT: P00702, EVALUE 1.60e+00
LCPGDDLTVVGELRYGALPVICLCHKVRASALCCFSSTHLGGYSTAREGREPGECHLPGEEVLPPETTADLVGEWKRVPDRNGLNRYREQGWYLQLDELAPGECICPQG

SEQ ID NO: 33222 - protein, 117 aa, Homo sapiens
  MAP TO AF196969.1; EXPRESSED IN BRAIN, SIGNAL = 1.4; EXPRESSED IN LUNG, SIGNAL = 4.3; EXPRESSED IN FETAL LIVER, SIGNAL =   2; EXPRESSED IN PLACENTA, SIGNAL = 2.8
SQGCASPMMTDTAWPAAHSTAASPCASWCLPHPQCFACYGATPVVSPTSPGPSPMTSSCPPHWMPPCASGPLRMVAASERSLTPIALNCSAAPSSLSTTTSLWSGSRTPTHQGLVGW

SEQ ID NO: 33223 - protein, 86 aa, Homo sapiens
  MAP TO AC008984.5; EXPRESSED IN BRAIN, SIGNAL = 0.91; EXPRESSED IN PLACENTA, SIGNAL = 0.85; SWISSPROT HIT: Q64281, EVALUE 3.00e-15
FYNKPTLSALPSPVVTSGENVTLQCGSRLRFDRFILTEEGDHKLSWTLDSQLTPSGQFQALFPVGPVTPSHRWMLRCYGSRRHILQ

SEQ ID NO: 33224 - protein, 60 aa, Homo sapiens
  MAP TO AC010514.4; EXPRESSED IN PLACENTA, SIGNAL =   1; EXPRESSED IN FETAL LIVER, SIGNAL = 0.98; EXPRESSED IN BRAIN, SIGNAL = 0.78; SWISSPROT HIT: Q92599, EVALUE 2.10e+00
LQDKFEHLKMIQQEEIRKLEEEKKQLEGEIIDFYKMKAASEALQTQLSTDTKKDKHRKKQ

SEQ ID NO: 33225 - protein, 34 aa, Homo sapiens
  MAP TO AC000395.1; EXPRESSED IN HELA, SIGNAL = 1.8; EXPRESSED IN BRAIN, SIGNAL = 1.2; SWISSPROT HIT: Q92020, EVALUE 6.60e+00
TPTWATRLCPHTGNPTLRKTAATWRSPRRWAAAP

SEQ ID NO: 33226 - protein, 91 aa, Homo sapiens
  MAP TO AC000395.1; EXPRESSED IN HELA, SIGNAL = 1.8; EXPRESSED IN BRAIN, SIGNAL = 1.2; SWISSPROT HIT: P19835, EVALUE 1.00e-38
DPNMGHSAVPTHWEPYTTENSGYLEITKKMGSSSMKRSLRTNFLRYWTLTYLALPTVTDQEASSMPSTGDSEATPISPDRQLRVCPRPCNG

SEQ ID NO: 33227 - protein, 65 aa, Homo sapiens
  MAP TO AC011513.2; EXPRESSED IN PLACENTA, SIGNAL = 1.6; EXPRESSED IN LUNG, SIGNAL = 9.9; EXPRESSED IN BRAIN, SIGNAL = 0.78; EXPRESSED IN HELA, SIGNAL = 0.71; SWISSPROT HIT: O24585, EVALUE 2.70e+00
DDAVISISQEVASEGNLTEYQIYLVNPNVLHKIRDPLVHPVTDISSIFNTAVCSNVQWSFSELDF

SEQ ID NO: 33228 - protein, 102 aa, Homo sapiens
  MAP TO AC007565.1; EXPRESSED IN HEART, SIGNAL = 2.6; EXPRESSED IN BRAIN, SIGNAL = 2.7; EXPRESSED IN PLACENTA, SIGNAL = 2.4; SWISSPROT HIT: Q95242, EVALUE 5.70e-01
SLAIPAPSIRLVPPYPSSQEDPIHIACMAPGNFPGANFTLYRGGQVVQLLQAPTDQRGVTFNLSGGSSKAPGGPFHCQYGVLGELNQSQLSDLSEPVNVSFP

SEQ ID NO: 33229 - protein, 67 aa, Homo sapiens
  MAP TO AC000125.1; EXPRESSED IN LUNG, SIGNAL = 7.5; EXPRESSED IN BRAIN, SIGNAL = 1.3; EXPRESSED IN HELA, SIGNAL = 0.67
PAPLHHCHHHYHHHHHYHHYYHHHHHHHHHIIATFTTSITTTTTTTLPLLPYHNHHCPHHHYQYQAA

SEQ ID NO: 33230 - protein, 68 aa, Homo sapiens
  MAP TO AC000125.1; EXPRESSED IN LUNG, SIGNAL = 7.5; EXPRESSED IN BRAIN, SIGNAL = 1.3; EXPRESSED IN HELA, SIGNAL = 0.67
TSTTTPLPPSLPSPPPLPPLLSSPPSPPPPHHCHLYYQHHHHHHHNTTATTIPQPPLSPPSLSVPSSL

SEQ ID NO: 33231 - protein, 41 aa, Homo sapiens
  MAP TO AC022127.3; EXPRESSED IN BRAIN, SIGNAL = 3.6; EXPRESSED IN PLACENTA, SIGNAL = 3.5; EXPRESSED IN LUNG, SIGNAL = 4.7; EXPRESSED IN HELA, SIGNAL = 4.1; EXPRESSED IN FETAL LIVER, SIGNAL = 3.5
EEGNRIWMPFQTKTQISNKEELLADQHSPCSFSQHLNSKLP

SEQ ID NO: 33232 - protein, 36 aa, Homo sapiens
  MAP TO AC022127.3; EXPRESSED IN BRAIN, SIGNAL = 3.6; EXPRESSED IN PLACENTA, SIGNAL = 3.5; EXPRESSED IN LUNG, SIGNAL = 4.7; EXPRESSED IN HELA, SIGNAL = 4.1; EXPRESSED IN FETAL LIVER, SIGNAL = 3.5
GKKGIEYGCPSRPKHKSPTKKNSWLTSTLLAASLSI

SEQ ID NO: 33233 - protein, 42 aa, Homo sapiens
  MAP TO AC001642.1; EXPRESSED IN BRAIN, SIGNAL = 0.38; SWISSPROT HIT: Q9JVX8, EVALUE 8.40e+00
EVVFLNGAQELSPLVNFLLTMKMVLIKDTGQMISVPFSAKRK

SEQ ID NO: 33234 - protein, 63 aa, Homo sapiens
  MAP TO AF037338.1; EXPRESSED IN HELA, SIGNAL = 5.7; EXPRESSED IN BRAIN, SIGNAL = 3.2; EXPRESSED IN PLACENTA, SIGNAL = 2.9
IQFWNSRQSLEGLSVRSVFFGVFQSFVVLLYILDNETNFVVQVSVFIGVLIDLWKITKVMDVR

SEQ ID NO: 33235 - protein, 63 aa, Homo sapiens
  MAP TO AF037338.1; EXPRESSED IN HELA, SIGNAL = 5.7; EXPRESSED IN BRAIN, SIGNAL = 3.2; EXPRESSED IN PLACENTA, SIGNAL = 2.9
ISSSGTAGSPWRACPCAPSSSAFSSHSWSSSTSWTTRPTSWSRSASSLGSSSTSGRSPRSWTS

SEQ ID NO: 33236 - protein, 63 aa, Homo sapiens
  MAP TO AF050154.1; EXPRESSED IN BRAIN, SIGNAL =   8; EXPRESSED IN LUNG, SIGNAL = 5.4
DARPRWSKRWRQSRSPSCASRPSGRAASAGNWHWVAFGITCAGCRHCLSRCRRSCSAPRSPRN

SEQ ID NO: 33237 - protein, 63 aa, Homo sapiens
  MAP TO AF050154.1; EXPRESSED IN BRAIN, SIGNAL =   8; EXPRESSED IN LUNG, SIGNAL = 5.4; SWISSPROT HIT: P02649, EVALUE 8.00e-32
CQAKVEQAVETEPEPELRQQTEWQSGQRWELALGRFWDYLRWVQTLSEQVQEELLSSQVTQEL

SEQ ID NO: 33238 - protein, 43 aa, Homo sapiens
  MAP TO AC005578.1; EXPRESSED IN PLACENTA, SIGNAL = 3.7; EXPRESSED IN HEART, SIGNAL = 1.7; EXPRESSED IN BRAIN, SIGNAL = 2.8; EXPRESSED IN FETAL LIVER, SIGNAL = 1.8; EXPRESSED IN LUNG, SIGNAL = 3.3; SWISSPROT HIT: P51641, EVALUE 2.20e+00
PPAALTLPRVQCRASRYPIAVDCSWTLPPAPNSTSPVSFIATY

SEQ ID NO: 33239 - protein, 32 aa, Homo sapiens
  MAP TO AF196970.1; EXPRESSED IN BRAIN, SIGNAL = 0.91; EXPRESSED IN HELA, SIGNAL = 0.85; EXPRESSED IN PLACENTA, SIGNAL = 4.6; EXPRESSED IN HEART, SIGNAL = 1.7
AASQDVGQDFGETGEQDGPWGSGARVLALKLV

SEQ ID NO: 33240 - protein, 36 aa, Homo sapiens
  MAP TO AC007379.2; EXPRESSED IN PLACENTA, SIGNAL = 1.8; EXPRESSED IN BRAIN, SIGNAL = 1.4; EXPRESSED IN LUNG, SIGNAL = 1.1; EXPRESSED IN FETAL LIVER, SIGNAL = 1.9
LCSWALQLSQLLLLLLLVLPPRLLFHLRAFWQKNTS

SEQ ID NO: 33241 - protein, 51 aa, Homo sapiens
  MAP TO AC006165.1; EXPRESSED IN BRAIN, SIGNAL = 4.4; EXPRESSED IN LUNG, SIGNAL = 4.6; SWISSPROT HIT: O75955, EVALUE 8.00e-22
EAKAKQEKVSAQYLSEIEMAKAQRDYELKKAAYDIEVNTRRAQADLAYQLQ

SEQ ID NO: 33242 - protein, 59 aa, Homo sapiens
  MAP TO AC005853.1; EXPRESSED IN BRAIN, SIGNAL = 0.41; EXPRESSED IN PLACENTA, SIGNAL = 0.4; SWISSPROT HIT: P48044, EVALUE 1.70e-02
FICCWSPYFLFDILDNFNLLPDTQERFYASVIIQNLPALNSAINPLIYCVFSSSISFPC

SEQ ID NO: 33243 - protein, 31 aa, Homo sapiens
  MAP TO AC005853.1; EXPRESSED IN BRAIN, SIGNAL = 0.41; EXPRESSED IN PLACENTA, SIGNAL = 0.4
PSSAVGVHTSCLTFWTISTSFQTPRSVSMPL

SEQ ID NO: 33244 - protein, 91 aa, Homo sapiens
  MAP TO AC004237.1; EXPRESSED IN FETAL LIVER, SIGNAL = 3.3; EXPRESSED IN BRAIN, SIGNAL = 1.4; EXPRESSED IN PLACENTA, SIGNAL = 2.7; SWISSPROT HIT: Q9Y496, EVALUE 2.00e-48
INKSEKPESCDNVKVVVRCRPLNEREKSMCYKQAVSVDEMRGTITVHKTDSSNEPPKTFTFDTVFGPESKQLDVYNLTARPIIDSVLEGYN

SEQ ID NO: 33245 - protein, 56 aa, Homo sapiens
  MAP TO AC012644.1; EXPRESSED IN BRAIN, SIGNAL = 0.41; SWISSPROT HIT: Q22703, EVALUE 7.30e-01
KANRWFGVAPPKSGKMNMNILHQEELIAQKKREIEAKMEQKAKQNQVASPQPPHPG

SEQ ID NO: 33246 - protein, 64 aa, Homo sapiens
  MAP TO AF196972.1; EXPRESSED IN PLACENTA, SIGNAL = 1.6; EXPRESSED IN HEART, SIGNAL = 1.5; EXPRESSED IN BRAIN, SIGNAL = 1.7; EXPRESSED IN FETAL LIVER, SIGNAL = 2.3; SWISSPROT HIT: P05143, EVALUE 4.90e-02
RGRLRVQVHSTHTAPHLATIPGGLHVEEEGAAGQGDPPPGLPHQQSGHVSPAPGRPSVPHPAGP

SEQ ID NO: 33247 - protein, 69 aa, Homo sapiens
  MAP TO AC016951.9; EXPRESSED IN HELA, SIGNAL = 1.5; EXPRESSED IN BRAIN, SIGNAL =   1; SWISSPROT HIT: P08922, EVALUE 5.90e+00
KNDAKLCLPAEENTYLLYLVDSYLASHGATKRALELKSKDKGSNLSCVDNGNVALGNPHNLSEPQISYQ

SEQ ID NO: 33248 - protein, 18 aa, Homo sapiens
  MAP TO AC016951.9; EXPRESSED IN HELA, SIGNAL = 1.5; EXPRESSED IN BRAIN, SIGNAL =   1
KMMQSFVYQQKKTHIYFI

SEQ ID NO: 33249 - protein, 24 aa, Homo sapiens
  MAP TO AL117259.3; EXPRESSED IN BRAIN, SIGNAL = 4.8; EXPRESSED IN PLACENTA, SIGNAL = 5.7; EXPRESSED IN HEART, SIGNAL = 4.1; EXPRESSED IN LUNG, SIGNAL =  28; EXPRESSED IN FETAL LIVER, SIGNAL = 4.5e+02
ANGRDPLKSRTPRKRTSTWTRRPP

SEQ ID NO: 33250 - protein, 89 aa, Homo sapiens
  MAP TO AL117259.3; EXPRESSED IN BRAIN, SIGNAL = 4.8; EXPRESSED IN PLACENTA, SIGNAL = 5.7; EXPRESSED IN HEART, SIGNAL = 4.1; EXPRESSED IN LUNG, SIGNAL =  28; EXPRESSED IN FETAL LIVER, SIGNAL = 4.5e+02; SWISSPROT HIT: P01009, EVALUE 1.00e-47
KWERPFEVKDTEEEDFHVDQATTVKVPMMKRLGMFNIQHCKKLSSWVLLMKYLGNATAIFFLPDEGKLQHLENELTHDIITKFLENEDR

SEQ ID NO: 33251 - protein, 73 aa, Homo sapiens
  MAP TO AF196969.1; EXPRESSED IN FETAL LIVER, SIGNAL = 4.5; EXPRESSED IN BRAIN, SIGNAL = 0.79; SWISSPROT HIT: Q9ZHA5, EVALUE 9.10e-02
QIYGDVLYFLTEHRDGFQHGELGHPLYFWFYFVFMNALWLVLPGVLVLDAVKHLTHAQSTLDAKATKAKSKKN

SEQ ID NO: 33252 - protein, 92 aa, Homo sapiens
  MAP TO AL031707.17; EXPRESSED IN PLACENTA, SIGNAL = 2.3; EXPRESSED IN BRAIN, SIGNAL = 1.8
PRSSWSCPPSWCCPPSWPAHPPGLHTLLACTPSWPTQAATGPRVPVRMSRRWTLRGLMGLGQAGRGRGAGPVQRPPALRRMTPCFLPCPRRW

SEQ ID NO: 33253 - protein, 56 aa, Homo sapiens
  MAP TO AC007292.1; EXPRESSED IN PLACENTA, SIGNAL = 1.4; EXPRESSED IN FETAL LIVER, SIGNAL = 1.5; EXPRESSED IN BRAIN, SIGNAL = 1.6; SWISSPROT HIT: P46737, EVALUE 2.00e-04
IYQSLFLRGLSLVGWYHSHPHSPALPSLQDIDAQMDYQLRLQGSSNGFQPCLALLC

SEQ ID NO: 33254 - protein, 56 aa, Homo sapiens
  MAP TO AC007292.1; EXPRESSED IN PLACENTA, SIGNAL = 1.4; EXPRESSED IN FETAL LIVER, SIGNAL = 1.5; EXPRESSED IN BRAIN, SIGNAL = 1.6; SWISSPROT HIT: Q63415, EVALUE 2.80e+00
STRACSCGACPWWAGTTATHTARRCHLCRTSTHRWTTSCGCRAPAMASSPASPCSA

SEQ ID NO: 33255 - protein, 60 aa, Homo sapiens
  MAP TO AC005569.1; EXPRESSED IN PLACENTA, SIGNAL = 0.63; EXPRESSED IN FETAL LIVER, SIGNAL = 0.47; EXPRESSED IN BRAIN, SIGNAL = 0.4; EXPRESSED IN HELA, SIGNAL = 0.5; SWISSPROT HIT: P76637, EVALUE 1.20e+00
MVSLTYNRGKNKSSDPSWQESNRRMYEEPELPGGVALQPPFVPGLQGRVSEMEKRCTETT

SEQ ID NO: 33256 - protein, 60 aa, Homo sapiens
  MAP TO AC005569.1; EXPRESSED IN PLACENTA, SIGNAL = 0.63; EXPRESSED IN FETAL LIVER, SIGNAL = 0.47; EXPRESSED IN BRAIN, SIGNAL = 0.4; EXPRESSED IN HELA, SIGNAL = 0.5; SWISSPROT HIT: Q9WUH7, EVALUE 4.20e-01
WSPSPTTEAKTNLPIQVGKNLTEECTKSLNFLEELPCSHPLCLAFKEELVRWRRDAQRPP

SEQ ID NO: 33257 - protein, 35 aa, Homo sapiens
  MAP TO AC009509.7; EXPRESSED IN BRAIN, SIGNAL =   1; EXPRESSED IN LUNG, SIGNAL = 1.7; EXPRESSED IN HELA, SIGNAL = 0.58
AKMENMKSCSIPVPSPLCWMHRVSVIWRKVHHPLQ

SEQ ID NO: 33258 - protein, 51 aa, Homo sapiens
  MAP TO AC009509.7; EXPRESSED IN BRAIN, SIGNAL =   1; EXPRESSED IN LUNG, SIGNAL = 1.7; EXPRESSED IN HELA, SIGNAL = 0.58; SWISSPROT HIT: P11279, EVALUE 2.10e+00
KDGEYEELLNSSSISSLLDAQGFSDLEKSPSPTPVMGSPSCDPFNTSVPEE

SEQ ID NO: 33259 - protein, 25 aa, Homo sapiens
  MAP TO AC007559.3; EXPRESSED IN BRAIN, SIGNAL = 0.6
CPKSPSHCALSFPSWCLPHLMVSGL

SEQ ID NO: 33260 - protein, 56 aa, Homo sapiens
  MAP TO AC012310.4; EXPRESSED IN PLACENTA, SIGNAL = 1.1; EXPRESSED IN BRAIN, SIGNAL = 0.99; EXPRESSED IN FETAL LIVER, SIGNAL =   1; SWISSPROT HIT: P29315, EVALUE 1.00e-04
LEECGLTSTCCKDLASVLTCSKTLQQLNLTLNTLDHTGVVVLCEALRHPECALQVL

SEQ ID NO: 33261 - protein, 72 aa, Homo sapiens
  MAP TO AC016831.1; EXPRESSED IN PLACENTA, SIGNAL = 1.9; EXPRESSED IN BRAIN, SIGNAL = 1.6
VTEMEPSPSHLLMAVSCDPLNPGHHAFQFHLREHFQVRLKPSGSSRGLNPFGMLSGRQNQGPMIHDLVLVPM

SEQ ID NO: 33262 - protein, 77 aa, Homo sapiens
  MAP TO AL023654.2; EXPRESSED IN FETAL LIVER, SIGNAL = 1.8; EXPRESSED IN BRAIN, SIGNAL = 0.75; SWISSPROT HIT: Q11186, EVALUE 6.00e-11
QTLQVLSDLVRKARSRNIGIFHPSFNLSKFLRQGLCKCLPANVHQLISGKIGISLTRVSDGENVLVSDFRSKDEVVD

SEQ ID NO: 33263 - protein, 27 aa, Homo sapiens
  MAP TO AL023654.2; EXPRESSED IN FETAL LIVER, SIGNAL = 1.8; EXPRESSED IN BRAIN, SIGNAL = 0.75
SRLCRSSQILCGRPGVGTLASSIHPST

SEQ ID NO: 33264 - protein, 59 aa, Homo sapiens
  MAP TO AL023654.2; EXPRESSED IN FETAL LIVER, SIGNAL = 1.8; EXPRESSED IN BRAIN, SIGNAL = 0.75; SWISSPROT HIT: O70397, EVALUE 3.60e+00
ADSAGPLRSCAEGQESEHWHLPSILQLKQVPPTGSLQMPPGQCPPAHLRQNRHLSYQSV

SEQ ID NO: 33265 - protein, 33 aa, Homo sapiens
  MAP TO AL109769.4; EXPRESSED IN BRAIN, SIGNAL = 0.65; EXPRESSED IN HELA, SIGNAL = 0.48
ESSPCWYIPSFPSSHFQIQIQISPNTSTILTLC

SEQ ID NO: 33266 - protein, 50 aa, Homo sapiens
  MAP TO AL049590.10; EXPRESSED IN HEART, SIGNAL = 3.1; EXPRESSED IN BRAIN, SIGNAL = 2.1; EXPRESSED IN FETAL LIVER, SIGNAL = 2.6; EXPRESSED IN PLACENTA, SIGNAL = 5.3
MRFVLSERNDLRQSKLFRTNLVVSSTTSEITNQFHYCLIESKMFSGIRKG

SEQ ID NO: 33267 - protein, 55 aa, Homo sapiens
  MAP TO AC007207.22; EXPRESSED IN PLACENTA, SIGNAL = 0.76; EXPRESSED IN HEART, SIGNAL =   1; EXPRESSED IN BRAIN, SIGNAL = 0.73; SWISSPROT HIT: Q01168, EVALUE 1.60e+00
LATPSPPALPRVHTAGFAHRVHTVGSEPPLWNHMGSHRDQSHGKARTCSKRWPKE

SEQ ID NO: 33268 - protein, 84 aa, Homo sapiens
  MAP TO AF228727.2; EXPRESSED IN HELA, SIGNAL = 1.3; EXPRESSED IN BRAIN, SIGNAL = 1.1; EXPRESSED IN PLACENTA, SIGNAL = 1.5; EXPRESSED IN FETAL LIVER, SIGNAL = 1.3; SWISSPROT HIT: Q00196, EVALUE 2.10e-02
AISPKPQSQKKNEADISSSANTQKPALLSSTLSSGKARSKKCKHESGDSSGCIKPPKSPLSPELIQVEDLTLVSQLSSSVINKT

SEQ ID NO: 33269 - protein, 38 aa, Homo sapiens
  MAP TO AC004462.3; EXPRESSED IN PLACENTA, SIGNAL = 1.3; EXPRESSED IN BRAIN, SIGNAL = 0.69
VSTLFLQGPDDKYFQVASFTGHPLSATAAQPCCRGAKA

SEQ ID NO: 33270 - protein, 33 aa, Homo sapiens
  MAP TO AC009567.8; EXPRESSED IN FETAL LIVER, SIGNAL = 1.2; EXPRESSED IN BRAIN, SIGNAL =   2; EXPRESSED IN PLACENTA, SIGNAL = 1.5; SWISSPROT HIT: P29673, EVALUE 8.60e+00
VALPKMLIMIWTMKCRLRWSQMEMRNVLGTGAK

SEQ ID NO: 33271 - protein, 154 aa, Homo sapiens
  MAP TO AC000090.2; EXPRESSED IN PLACENTA, SIGNAL = 0.83; EXPRESSED IN HEART, SIGNAL = 0.98; EXPRESSED IN LUNG, SIGNAL = 0.58; EXPRESSED IN BRAIN, SIGNAL = 0.7; EXPRESSED IN FETAL LIVER, SIGNAL = 0.45
APAAPTQTAQDHIYANSSLSKPLQSLPPEPSKLQFTCNSAGPPPSTTAPHPPIILVPQPVTLPSTQPASLYPSSCRDTPATLVVQDWASNHQYASASSAPPMPLSHTLIPVRPRQSQFLLSIHTFPVTSMPTLSHVPALETFMQCLLRQNKQVD

SEQ ID NO: 33272 - protein, 35 aa, Homo sapiens
  MAP TO AC008524.5; EXPRESSED IN HEART, SIGNAL =  14; EXPRESSED IN LUNG, SIGNAL = 5.9; EXPRESSED IN BRAIN, SIGNAL = 3.5; EXPRESSED IN PLACENTA, SIGNAL =  10
WLTEKTYLVSAISLHPSMTLLSMSLIFLAKKPSAV

SEQ ID NO: 33273 - protein, 37 aa, Homo sapiens
  MAP TO AC011532.6; EXPRESSED IN PLACENTA, SIGNAL = 1.4; EXPRESSED IN HEART, SIGNAL = 1.8; EXPRESSED IN BRAIN, SIGNAL = 1.5; EXPRESSED IN FETAL LIVER, SIGNAL = 0.98
HMRASRNGSSTASRKQGRCHCFRITSPARCFTSSSRW

SEQ ID NO: 33274 - protein, 46 aa, Homo sapiens
  MAP TO AC024070.2; EXPRESSED IN BRAIN, SIGNAL = 0.48; EXPRESSED IN HELA, SIGNAL = 0.66; SWISSPROT HIT: P73555, EVALUE 4.90e+00
WHLAMTASGCGLYPWGPCPWKQCLLLGFSILHLPTYVDLRDTPSRS

SEQ ID NO: 33275 - protein, 64 aa, Homo sapiens
  MAP TO AL096870.3; EXPRESSED IN FETAL LIVER, SIGNAL = 2.3; EXPRESSED IN HELA, SIGNAL = 2.1; EXPRESSED IN BRAIN, SIGNAL = 2.4; EXPRESSED IN PLACENTA, SIGNAL = 2.2; SWISSPROT HIT: P39929, EVALUE 1.00e-05
VWAGSAALQALRRKKRFEQQLAQTDGTLSTLEFQREAIENATTNAEVLRTMELAAQSMKKAYQD

SEQ ID NO: 33276 - protein, 57 aa, Homo sapiens
  MAP TO AL096870.3; EXPRESSED IN FETAL LIVER, SIGNAL = 2.3; EXPRESSED IN HELA, SIGNAL = 2.1; EXPRESSED IN BRAIN, SIGNAL = 2.4; EXPRESSED IN PLACENTA, SIGNAL = 2.2; SWISSPROT HIT: P23090, EVALUE 2.80e+00
YGLGQLPYRLCGGRKDSNSSWHKLTGHYPPWSFSVRPLRMPLPMQKSFVPWSLLPKA

SEQ ID NO: 33277 - protein, 69 aa, Homo sapiens
  MAP TO AC010327.5; EXPRESSED IN PLACENTA, SIGNAL = 0.92; EXPRESSED IN HEART, SIGNAL = 1.1; EXPRESSED IN BRAIN, SIGNAL = 1.3
WAFLTGTPPLSRQAWPPLPPPTSSTSGPSASLPCSPACCCSSSWPLAPTSALCSSTSSRIWSCRWQPMG

SEQ ID NO: 33278 - protein, 67 aa, Homo sapiens
  MAP TO AL096870.3; EXPRESSED IN BRAIN, SIGNAL = 1.2; EXPRESSED IN PLACENTA, SIGNAL = 1.2; SWISSPROT HIT: Q92696, EVALUE 3.00e-36
HCWDYRRFVATQAAVPPAEELAFTDSLITRNFSNYSSWHYRSCLLPQLHPQPDSGPQGRLPEDVLLK

SEQ ID NO: 33279 - protein, 21 aa, Homo sapiens
  MAP TO AL096870.3; EXPRESSED IN BRAIN, SIGNAL = 1.2; EXPRESSED IN PLACENTA, SIGNAL = 1.2
FTAGTIGGLWPHRQPCPLQKS

SEQ ID NO: 33280 - protein, 24 aa, Homo sapiens
  MAP TO AL096870.3; EXPRESSED IN BRAIN, SIGNAL = 1.2; EXPRESSED IN PLACENTA, SIGNAL = 1.2
SLLGLSAVCGHTGSRAPCRRASLH

SEQ ID NO: 33281 - protein, 17 aa, Homo sapiens
  MAP TO AL035402.7; EXPRESSED IN PLACENTA, SIGNAL = 1.4; EXPRESSED IN BRAIN, SIGNAL = 1.3; EXPRESSED IN LUNG, SIGNAL = 1.4
SVTSIHLERLDVANVSL

SEQ ID NO: 33282 - protein, 38 aa, Homo sapiens
  MAP TO AC009509.7; EXPRESSED IN FETAL LIVER, SIGNAL = 1.1; EXPRESSED IN LUNG, SIGNAL = 0.83; EXPRESSED IN PLACENTA, SIGNAL = 0.84; EXPRESSED IN BRAIN, SIGNAL = 1.1
GGCGLGVCRLWCTESLPETGLPGHSCCIRELQILYSAC

SEQ ID NO: 33283 - protein, 39 aa, Homo sapiens
  MAP TO AC009509.7; EXPRESSED IN FETAL LIVER, SIGNAL = 1.1; EXPRESSED IN LUNG, SIGNAL = 0.83; EXPRESSED IN PLACENTA, SIGNAL = 0.84; EXPRESSED IN BRAIN, SIGNAL = 1.1; SWISSPROT HIT: P01382, EVALUE 6.50e+00
MEGVGWVSAGCGAPRAFPKLGCLATAAASENYKSYIQHV

SEQ ID NO: 33284 - protein, 92 aa, Homo sapiens
  MAP TO AC061958.9; EXPRESSED IN HEART, SIGNAL = 1.2; EXPRESSED IN BRAIN, SIGNAL = 1.2; EXPRESSED IN LUNG, SIGNAL = 1.6; EXPRESSED IN PLACENTA, SIGNAL = 1.4; SWISSPROT HIT: P37774, EVALUE 1.10e+00
DYTHTSVKVCIIEQTMKWLLNVMLLYDSYIVVVRDEPREETKQSGELLLKVSLKGKQSGTQSKPTSRLRFSLKRYKKAIIERQGREKDNIED

SEQ ID NO: 33285 - protein, 25 aa, Homo sapiens
  MAP TO AC061958.9; EXPRESSED IN HEART, SIGNAL = 1.2; EXPRESSED IN BRAIN, SIGNAL = 1.2; EXPRESSED IN LUNG, SIGNAL = 1.6; EXPRESSED IN PLACENTA, SIGNAL = 1.4
LYPYFSEGLYYRADHEMVTKCYVTL

SEQ ID NO: 33286 - protein, 34 aa, Homo sapiens
  MAP TO AC009286.31; EXPRESSED IN BRAIN, SIGNAL = 0.73; EXPRESSED IN FETAL LIVER, SIGNAL = 0.49
HCWYQDTIPRPLLLLLPVQEMVTGLATDRLCRLP

SEQ ID NO: 33287 - protein, 36 aa, Homo sapiens
  MAP TO AC002309.2; EXPRESSED IN FETAL LIVER, SIGNAL = 2.7; EXPRESSED IN LUNG, SIGNAL = 4.5; EXPRESSED IN BRAIN, SIGNAL = 1.3; EXPRESSED IN PLACENTA, SIGNAL = 2.4
TASAAITKYHRLDGLNNKNLFLTVLEAGKSKIKVSA

SEQ ID NO: 33288 - protein, 51 aa, Homo sapiens
  MAP TO AC005306.1; EXPRESSED IN BRAIN, SIGNAL = 0.81
ESPWRGQGITNLWILTRKEGKGRRRRAGECPRPAGAGAATASGARGPARGS

SEQ ID NO: 33289 - protein, 28 aa, Homo sapiens
  MAP TO AC006167.1; EXPRESSED IN BRAIN, SIGNAL = 0.63
FDKEFPEAHHRQLNSGLLFLPLLASVDS

SEQ ID NO: 33290 - protein, 21 aa, Homo sapiens
  MAP TO AC005604.1; EXPRESSED IN BRAIN, SIGNAL = 0.41
VPIEDLSSWKKESVNLIDQMK

SEQ ID NO: 33291 - protein, 78 aa, Homo sapiens
  MAP TO AC008488.6; EXPRESSED IN BRAIN, SIGNAL = 0.77; EXPRESSED IN FETAL LIVER, SIGNAL = 0.97; SWISSPROT HIT: Q13418, EVALUE 7.00e-03
IQWSTLWTAALTKMKTSRNSIAALTIEGACSPGTGVSTSSVSLLQGGNTALHLAAKHGHSPAVQVLLAQWQDINEMNE

SEQ ID NO: 33292 - protein, 75 aa, Homo sapiens
  MAP TO AL109797.18; EXPRESSED IN LUNG, SIGNAL = 1.6; EXPRESSED IN HELA, SIGNAL = 1.7; EXPRESSED IN FETAL LIVER, SIGNAL = 1.7; EXPRESSED IN BRAIN, SIGNAL = 1.3; SWISSPROT HIT: P70398, EVALUE 9.00e-40
YDALCILLRHSKNVRFWFAHNVLFNVSNRFSEYLLECPSAEVRGAFAKLIVFIAHFSLQDGPCPSPFASPGPSSQ

SEQ ID NO: 33293 - protein, 41 aa, Homo sapiens
  MAP TO AL109797.18; EXPRESSED IN LUNG, SIGNAL = 1.6; EXPRESSED IN HELA, SIGNAL = 1.7; EXPRESSED IN FETAL LIVER, SIGNAL = 1.7; EXPRESSED IN BRAIN, SIGNAL = 1.3
MMHCVFSFVTARMYVFGLLITSFLMFQIASPNTFWSALVQK

SEQ ID NO: 33294 - protein, 70 aa, Homo sapiens
  MAP TO AL109772.2; EXPRESSED IN BRAIN, SIGNAL = 0.57; EXPRESSED IN LUNG, SIGNAL = 0.55; EXPRESSED IN PLACENTA, SIGNAL = 0.56; SWISSPROT HIT: Q9PKU9, EVALUE 2.50e+00
MAVAGPYVLHVTSTEDTHGWTRRTWWRQRLGYSKNYKASKRMSQLWLGEPLGLGFTKGLSSSRLLIARNV

SEQ ID NO: 33295 - protein, 61 aa, Homo sapiens
  MAP TO AC010168.6; EXPRESSED IN FETAL LIVER, SIGNAL = 1.7; EXPRESSED IN LUNG, SIGNAL = 3.6; EXPRESSED IN BRAIN, SIGNAL = 2.5; EXPRESSED IN PLACENTA, SIGNAL = 1.9
PVWWSLHTDAHEIWCHDSDRGTSLGRSIPCPPALCSVRNIRLRPQVLRPTSPRNISPISNP

SEQ ID NO: 33296 - protein, 22 aa, Homo sapiens
  MAP TO AC025436.2; EXPRESSED IN BRAIN, SIGNAL =   2; EXPRESSED IN PLACENTA, SIGNAL = 0.99
DLLQSSPSGRSLLTAKLTKVTS

SEQ ID NO: 33297 - protein, 102 aa, Homo sapiens
  MAP TO AC025436.2; EXPRESSED IN BRAIN, SIGNAL =   2; EXPRESSED IN PLACENTA, SIGNAL = 0.99; SWISSPROT HIT: Q9Y5I4, EVALUE 5.00e-38
PEAGEVSPPVGAGVNSNSWTFKYGPGNPKQSGPGELPDKFIIPGSPAIISIRQEPTNSQIDKSDFITFGKKEETKKKKKKKKGNKTQEKKEKGNSTTDNSDQ

SEQ ID NO: 33298 - protein, 50 aa, Homo sapiens
  MAP TO AF196971.1; EXPRESSED IN LUNG, SIGNAL = 4.1; EXPRESSED IN BRAIN, SIGNAL = 2.4; EXPRESSED IN PLACENTA, SIGNAL = 2.6; EXPRESSED IN HEART, SIGNAL = 4.8; EXPRESSED IN FETAL LIVER, SIGNAL = 3.5; SWISSPROT HIT: Q00269, EVALUE 8.20e+00
CYMCPCTAMIMAPSSPWGMRVPAARSAGLRAQASPSTWHGTGPAWVMLTT

SEQ ID NO: 33299 - protein, 37 aa, Homo sapiens
  MAP TO AC012085.4; EXPRESSED IN FETAL LIVER, SIGNAL = 1.7; EXPRESSED IN BRAIN, SIGNAL = 1.3; EXPRESSED IN PLACENTA, SIGNAL = 1.5; SWISSPROT HIT: P44567, EVALUE 2.90e+00
EKWRPETNKYSAHFAWSWVQRYWWRDWFFSTSTRKES

SEQ ID NO: 33300 - protein, 101 aa, Homo sapiens
  MAP TO AC012085.4; EXPRESSED IN FETAL LIVER, SIGNAL = 1.7; EXPRESSED IN BRAIN, SIGNAL = 1.3; EXPRESSED IN PLACENTA, SIGNAL = 1.5; SWISSPROT HIT: P78560, EVALUE 4.00e-40
GEMEARDKQVLRSLRLELGAEVLVEGLVLQYLYQEGILTENHIQEINAQTTGLRKTMLLLDILPSRGPKAFDTFLDSLQEFPWVREKLKKAREEAMTDLPA

SEQ ID NO: 33301 - protein, 32 aa, Homo sapiens
  MAP TO AC009003.7; EXPRESSED IN HEART, SIGNAL =   2; EXPRESSED IN LUNG, SIGNAL = 2.5; EXPRESSED IN FETAL LIVER, SIGNAL = 2.9; EXPRESSED IN BRAIN, SIGNAL = 2.1; EXPRESSED IN PLACENTA, SIGNAL = 2.3
VLAFPSSGFTDLAEIVSRIEPPTSYVSDGCAD

SEQ ID NO: 33302 - protein, 50 aa, Homo sapiens
  MAP TO AC009003.7; EXPRESSED IN HEART, SIGNAL =   2; EXPRESSED IN LUNG, SIGNAL = 2.5; EXPRESSED IN FETAL LIVER, SIGNAL = 2.9; EXPRESSED IN BRAIN, SIGNAL = 2.1; EXPRESSED IN PLACENTA, SIGNAL = 2.3; SWISSPROT HIT: Q28969, EVALUE 4.80e+00
APRLCGPPLRASPVSPHRCLPSQALASLTWQRLCPGLSPPRAMSLMAVLT

SEQ ID NO: 33303 - protein, 73 aa, Homo sapiens
  MAP TO AL109797.18; EXPRESSED IN PLACENTA, SIGNAL = 2.2; EXPRESSED IN BRAIN, SIGNAL = 0.72; SWISSPROT HIT: P70398, EVALUE 8.00e-39
CEALTEWEYLPPVGPRPPKGFVGLKNAGATCYMNSVIQQLYMIPSIRNGILAIEGTGSDVDDDMSGDEKQDNE

SEQ ID NO: 33304 - protein, 24 aa, Homo sapiens
  MAP TO AL109797.18; EXPRESSED IN PLACENTA, SIGNAL = 2.2; EXPRESSED IN BRAIN, SIGNAL = 0.72
LVKHLLSGNICHLLDPAHPKDSWG

SEQ ID NO: 33305 - protein, 120 aa, Homo sapiens
  MAP TO AF230666.1; EXPRESSED IN FETAL LIVER, SIGNAL = 0.53; EXPRESSED IN BRAIN, SIGNAL = 0.65; SWISSPROT HIT: P22555, EVALUE 1.90e-01
NKHHPDLHLWACSGKRKDQDQIIAGVEKKIAQDTVNREEKKYVQNHKEPPRLPLKMEGTYITSEHSYQKPQSFGQDCKSLADPGSSDDDDVSSLEEEQEFHMRSKNSLQYSAKEHGMPEK

SEQ ID NO: 33306 - protein, 21 aa, Homo sapiens
  MAP TO AF230666.1; EXPRESSED IN FETAL LIVER, SIGNAL = 0.53; EXPRESSED IN BRAIN, SIGNAL = 0.65
INIILTFISGLVPGSEKTKIK

SEQ ID NO: 33307 - protein, 64 aa, Homo sapiens
  MAP TO AC016594.5; EXPRESSED IN LUNG, SIGNAL = 1.5; EXPRESSED IN FETAL LIVER, SIGNAL = 1.1; EXPRESSED IN BRAIN, SIGNAL = 0.58; EXPRESSED IN PLACENTA, SIGNAL = 0.77; SWISSPROT HIT: P40078, EVALUE 3.00e-22
GLRFKKAHVTHPELKATFCLPILGVKKNPSSPLYTTLGVITKGTVIEVNVSELGLVTQGGKVIW

SEQ ID NO: 33308 - protein, 66 aa, Homo sapiens
  MAP TO AC010238.4; EXPRESSED IN BRAIN, SIGNAL = 0.9; EXPRESSED IN PLACENTA, SIGNAL = 0.92; SWISSPROT HIT: P17208, EVALUE 7.50e-02
SKQNCQEIHARFGDGAGASMWGAGDGVRACGGRCWAHSGHHHPHRAGLGSSGCLPNAIREAGSSLL

SEQ ID NO: 33309 - protein, 63 aa, Homo sapiens
  MAP TO AC009086.5; EXPRESSED IN BRAIN, SIGNAL = 0.47; EXPRESSED IN PLACENTA, SIGNAL = 0.77
PFPTTLWAPPSTSPAAASALTSAKPNPFFLSSSAEAKLFHQATIQETLWDSASVLVKWEESLW

SEQ ID NO: 33310 - protein, 129 aa, Homo sapiens
  MAP TO AC000109.1; EXPRESSED IN BRAIN, SIGNAL = 0.41; EXPRESSED IN PLACENTA, SIGNAL = 0.39; SWISSPROT HIT: P87133, EVALUE 8.90e+00
RKLYPDVVHNFPEFTKEPIKEIMKEIGDMAKKLGSEGFQDTNLGNIQALIDTMPEELTEDDFMEVSSSEPVLDNEEEDVEEAVPENKLTLDNLGEGLRLSKIAFYFFYDMGFLYMGTETKANGGRIGTK

SEQ ID NO: 33311 - protein, 22 aa, Homo sapiens
  MAP TO AC009265.5; EXPRESSED IN BRAIN, SIGNAL = 0.74; SWISSPROT HIT: O13418, EVALUE 5.20e+00
PTMVGRKNTWKQRKSQHQWRRF

SEQ ID NO: 33312 - protein, 33 aa, Homo sapiens
  MAP TO AC009265.5; EXPRESSED IN BRAIN, SIGNAL = 0.74
LQWLEEKILGNKESHSINGGGFNKTSRRFGTLL

SEQ ID NO: 33313 - protein, 18 aa, Homo sapiens
  MAP TO AC010163.7; EXPRESSED IN BRAIN, SIGNAL = 0.48
TPWPSLPTVLALNMKSAT

SEQ ID NO: 33314 - protein, 41 aa, Homo sapiens
  MAP TO AC000039.3; EXPRESSED IN BRAIN, SIGNAL = 0.42
PDEQGYLDKGDNWPKSSWGAQWRSLQKHLLCFWNCWQHPKV

SEQ ID NO: 33315 - protein, 61 aa, Homo sapiens
  MAP TO AC000051.2; EXPRESSED IN HELA, SIGNAL = 0.44; EXPRESSED IN BRAIN, SIGNAL = 0.43; SWISSPROT HIT: P45271, EVALUE 5.50e-01
GHAEMRHPLKLEVAKMQMRLGSQAPETTHGHVAFGSGDLLPQISEESGPAGSPRVTVWGSP

SEQ ID NO: 33316 - protein, 18 aa, Homo sapiens
  MAP TO AC000051.2; EXPRESSED IN HELA, SIGNAL = 0.44; EXPRESSED IN BRAIN, SIGNAL = 0.43
EDMQRCDTHLNSKLQRCK

SEQ ID NO: 33317 - protein, 74 aa, Homo sapiens [sequence omitted]

SEQ ID NO: 33318 - protein, 76 aa, Homo sapiens
  MAP TO AL049824.4; EXPRESSED IN FETAL LIVER, SIGNAL = 0.6; EXPRESSED IN BRAIN, SIGNAL = 0.45; SWISSPROT HIT: Q9UNP9, EVALUE 1.00e-34
NFRCLCTHEKGFGFKGSSFHRIIPQFMCQGGDFTNHNGTGGKSIYGKKFDDENFILKHTGPGRSQLACGDEGGWAR

SEQ ID NO: 33319 - protein, 62 aa, Homo sapiens
  MAP TO AL049824.4; EXPRESSED IN FETAL LIVER, SIGNAL = 0.6; EXPRESSED IN BRAIN, SIGNAL = 0.45
RISAACALMKRALALREAASTASSPSSCARAVISQTTMALGASPSMGRSSMMKTLSSSIRDQ

SEQ ID NO: 33320 - protein, 70 aa, Homo sapiens
  MAP TO AL118558.2; EXPRESSED IN BRAIN, SIGNAL = 7.5; EXPRESSED IN FETAL LIVER, SIGNAL = 4.8; SWISSPROT HIT: Q9JHU4, EVALUE 1.00e-33
VDMISKMLKMQMLEDEDDLAYAETEKKTRTDSTSDGRPAWMRTLHTTASNWLHLIPQTLSHLKRTVENIK

SEQ ID NO: 33321 - protein, 46 aa, Homo sapiens
  MAP TO AC002110.1; EXPRESSED IN BRAIN, SIGNAL = 0.55; EXPRESSED IN PLACENTA, SIGNAL = 0.41
WMTGLAEGLCAGKATVSIPMRPSPLLLHGERSPMASTCCHLAGCFP

SEQ ID NO: 33322 - protein, 41 aa, Homo sapiens
  MAP TO AC004461.3; EXPRESSED IN BRAIN, SIGNAL = 0.51; SWISSPROT HIT: P29473, EVALUE 2.20e+00
PWGPSSPASQPSWGPGAGVTVAPRATSAPTLGSMTCAARST

SEQ ID NO: 33323 - protein, 105 aa, Homo sapiens
  MAP TO AC004826.3; EXPRESSED IN BRAIN, SIGNAL = 0.45; SWISSPROT HIT: O95235, EVALUE 1.00e-46
DQTLAELQNNMVLVKLDLRKKAACIAEQYHTVLKLQGQVSAKKRLGTNQENQQPNQQPPGKKPFLRNLLPRTPTCQSSTDCSPYARILRSRRSPLLKSGPFGKKY

SEQ ID NO: 33324 - protein, 169 aa, Homo sapiens
  MAP TO AL022342.6; EXPRESSED IN PLACENTA, SIGNAL = 1.3; EXPRESSED IN LUNG, SIGNAL = 1.3; EXPRESSED IN BRAIN, SIGNAL =   1; SWISSPROT HIT: O77788, EVALUE 3.00e-03
INEISEDVYTAVEHSDSEDSEKSDSSDSEYISDDEQKSKNEPEDTEDKEGCQMDKEPSAVKKKPKPTNPVEIKEELKSTSPASEKADPGAVKDKASPEPEKDFSEKAKPSPHPIKDKLKGKDETDSPTVHLGLDSDSESELVIDLGEDHSGREGRKNKKEPKEPSPKQD

SEQ ID NO: 33325 - protein, 41 aa, Homo sapiens
  MAP TO AC002471.5; EXPRESSED IN BRAIN, SIGNAL = 0.47; SWISSPROT HIT: Q59088, EVALUE 4.90e+00
LCHESSRLQPGQEQLYWDTLKQLSKHIKPLHRVVNKIDKSE

SEQ ID NO: 33326 - protein, 42 aa, Homo sapiens
  MAP TO AC020952.4; EXPRESSED IN BRAIN, SIGNAL = 0.68
GLIPLKHLATKTPSWRLLPSEELNLGHSKRTDHLPVRTPVIQ

SEQ ID NO: 33327 - protein, 70 aa, Homo sapiens
  MAP TO AC003038.1; EXPRESSED IN BRAIN, SIGNAL = 1.8; EXPRESSED IN HEART, SIGNAL = 2.5; SWISSPROT HIT: O43272, EVALUE 3.90e+00
KQACMLIRNLVAHGQAFSKPILDLGAEALIMQARSAHRDCEDVAKAALRDLGCHVELRELWTGQRGNLAP

SEQ ID NO: 33328 - protein, 46 aa, Homo sapiens
  MAP TO AC010371.5; EXPRESSED IN BRAIN, SIGNAL =   1; SWISSPROT HIT: Q33134, EVALUE 6.30e+00
KRPKIITKKCPVSWRTEGENNSHVRGTSTTTPIIRLYLHDKTKALI

SEQ ID NO: 33329 - protein, 129 aa, Homo sapiens
  MAP TO AC002102.1; EXPRESSED IN BRAIN, SIGNAL = 0.58; SWISSPROT HIT: P27653, EVALUE 3.10e+00
MPGMPIRIFKGGFSKKCRNDRSFAPSALGKKPKAEPAHMVPGGGGPDAHTVGAQSTLITEPASFLKTYREGAKSGQTAGPRLRTPNPMEMLRCQALGTTPRSVSLGAGCTLVGADTAIGGSHGGIFGKQ

SEQ ID NO: 33330 - protein, 39 aa, Homo sapiens
  MAP TO AC000071.2; EXPRESSED IN BRAIN, SIGNAL = 0.44; SWISSPROT HIT: O75419, EVALUE 2.00e-16
TKNRRCKLLPLVMAAPLSMEHGTVTVVGIPPETDSSDRK

SEQ ID NO: 33331 - protein, 95 aa, Homo sapiens
  MAP TO AC002132.1; EXPRESSED IN BRAIN, SIGNAL = 2.7; SWISSPROT HIT: P20916, EVALUE 1.00e-48
APVLLLESHCAAARDTVQCLCVVKSNPEPSVAFELPSRNVTVNESEREFVYSERSGLVLTSILTLRGQAQAPPRVICTARNLYGAKSLELPFQGA

SEQ ID NO: 33332 - protein, 23 aa, Homo sapiens
  MAP TO AC002132.1; EXPRESSED IN BRAIN, SIGNAL = 2.7; SWISSPROT HIT: Q61129, EVALUE 4.00e+00
SPLCSSWSPTARQPETRCSACAW

SEQ ID NO: 33333 - protein, 33 aa, Homo sapiens
  MAP TO AC002132.1; EXPRESSED IN BRAIN, SIGNAL = 2.7; SWISSPROT HIT: P08169, EVALUE 3.90e+00
RPCAPPGVPLRGSPRHGAVPVRGEVQPGAVRGL

SEQ ID NO: 33334 - protein, 416 aa, Homo sapiens
  MAP TO AC022377.1; EXPRESSED IN LUNG, SIGNAL = 0.98; EXPRESSED IN BRAIN, SIGNAL = 1.5; SWISSPROT HIT: Q03164, EVALUE 4.10e-01
VEMLERKYGGRLVTRHAARTIQTAFRQYQMNKNFERLRSSMSENRMSRRIVLSNMRMQFSFEGPEKVHSSYFEGKQVSVTNDGSQLGALVSPECGDLSEPTTLKSPAPSSDFADAITELEDAFSRQVKSLAESIDDALNCRSLHTEEAPALDAARARDTEPQTALHGMDHRKLDEMTASYSDVTLYIDEEELSPPLPLSQAGDRPSSTESDLRLRAGGAAPDYWALAHKEDKADTDTSCRSTPSLERQEQRLRVEHLPLLTIEPPSDSSVDLSDRSERGSLKRQSAYERSLGGQQGSPKHGPHSGAPKSLPREEPELRPRPPRPLDSHLAINGSANRQSKSESDYSDGDNDSINSTSNSNDTINCSSESSSRDSLREQTLSKQTYHKEARNSWDSPAFSNDVIRKRHYRIGLNLFN

SEQ ID NO: 33335 - protein, 188 aa, Homo sapiens
  MAP TO AC007498.2; EXPRESSED IN FETAL LIVER, SIGNAL = 0.99; EXPRESSED IN BRAIN, SIGNAL = 1.3; EXPRESSED IN HELA, SIGNAL = 1.1; SWISSPROT HIT: P39806, EVALUE 2.00e-34
NSLSALAQQRKSKPPNVTAFEAKSTSDEAFFKHKCRFCAKVFGSDSALQIHLRSHTGERPFKCNICGNRFSTKGNLKVHFQRHKEKYPHIQMNPYPVPEHLDNIPTSTGIPYGMSIPPEKPVTSWLDTKPVLPTLTTSVGLPLPPTLPSLIPFIKTEEPAPIPISHSATSPPGSVKSDSGGPESATRN

SEQ ID NO: 33336 - protein, 75 aa, Homo sapiens
  MAP TO AC007498.2; EXPRESSED IN FETAL LIVER, SIGNAL = 0.99; EXPRESSED IN BRAIN, SIGNAL = 1.3; EXPRESSED IN HELA, SIGNAL = 1.1; SWISSPROT HIT: P79777, EVALUE 8.20e+00
TPCLPWPSKEKASHQMSLPLKRKVLPMRHSSNTSAGSARRSLGVTVPCRSTCVPIPERGHSSATSAGTGSPPRGI

SEQ ID NO: 33337 - protein, 307 aa, Homo sapiens
  MAP TO U73167.1; EXPRESSED IN BRAIN, SIGNAL = 1.2; EXPRESSED IN HELA, SIGNAL = 0.66; SWISSPROT HIT: Q28107, EVALUE 6.10e-02
QELTLSPGPAKLTPTLDPTHRMELILSTSPAELTLDPACQPKLPLDSTCQPEMTFNPGPTELTLDPEHQPEETPAPSLAELTLEPVHRRPELLDACADLINDQWPRSRTSRLHSLGQSSDAFPLCLMLLSPHPTLEAAPVVVGHARLSRVLNQPQSLLVETVVVARALRGRGFGRRLMEGLEVFARARGFRKLHLTTHDQVHFYTHLGYQLGEPVQGLVFTSRRLPATLLNAFPTAPSPRPPRKAPNLTAQAAPRGPKGPPLPPPPPLPECLTISPPVPSGPPSKSLLETQYQNVRGRPIFWMEKDI

SEQ ID NO: 33338 - protein, 31 aa, Homo sapiens
  MAP TO U73167.1; EXPRESSED IN BRAIN, SIGNAL = 1.2; EXPRESSED IN HELA, SIGNAL = 0.66
ARADSEPWPSQADPYTRPYTPDGADPEYQPS

SEQ ID NO: 33339 - protein, 198 aa, Homo sapiens
  MAP TO AL133375.3; EXPRESSED IN BRAIN, SIGNAL = 0.83; EXPRESSED IN HELA, SIGNAL = 0.68; SWISSPROT HIT: Q14999, EVALUE 2.00e-44
MVGERHAGDLMVPLGPRLQAYPEELIRQRPGHDGHPEYLIRWSVLKCGEVGKVGVEEGKAEHILMWLSAPEVYANCPGLLGERALSKGLQHEPAGVSGSFPRDPGGLDEVAMGEMEADVQALVRRAARQLAESGTPSLTAAVLHTIHVLSAYASIGPLTGVFRETGALDLLMHMLCNPEPQIRRSAGKMLQALAAHDA

SEQ ID NO: 33340 - protein, 84 aa, Homo sapiens
  MAP TO AL133375.3; EXPRESSED IN BRAIN, SIGNAL = 0.83; EXPRESSED IN HELA, SIGNAL = 0.68; SWISSPROT HIT: O15255, EVALUE 4.00e+00
WRLMFRRWYAGRPGSWQKVGPQASRPLCFTPSTCSVPTPASGPSLVSSGRQEPWTCSCTCYAILSLRSAGVQAKCCRLWQPTML

SEQ ID NO: 33341 - protein, 272 aa, Homo sapiens
  MAP TO AC005670.1; EXPRESSED IN LUNG, SIGNAL =   1; EXPRESSED IN BRAIN, SIGNAL = 1.2; EXPRESSED IN HELA, SIGNAL = 0.77; SWISSPROT HIT: O60309, EVALUE 0.00e+00
MTSAQCPALACVMSRLRFWGPWPLLMWQLLWLLVKEAQPLEWVKDPLQLTSNPLGPPEPWSSHSSHFPRESPHAPTLPADPWDFDHLGPSASSEMPAPPQESTENLVPFLDTWDSAGELPLEPEQFLASQQDLKDKLSPQERLPVSPKKLKKDPAQRWSLAEIIGIIRQLSTPHSQKQNLQNEYSSTDTPYPGSLPPELRVKSDEPPGPSEQVGPSQFHLEPETQNPETLEDIQSSSLQQEAPAQLPQLLEEEPSSMQQEAPALPPESSMES

SEQ ID NO: 33342 - protein, 179 aa, Homo sapiens
  MAP TO AC004590.1; EXPRESSED IN HELA, SIGNAL = 0.79; EXPRESSED IN BRAIN, SIGNAL = 1.8; SWISSPROT HIT: O43497, EVALUE 1.00e-105
AAIRTDSLDVQGLGSREDLLAEVSGPSPPLARAYSFWGQSSTQAQQHSRSHSKISKHMTPPAPCPGPEPNWGKGPPETRSSLELDTELSWISGDLLPPGGQEEPPSPRDLKKCYSVEAQSCQRRPTSWLDEQRRHSIAVSCLDSGSQPHLGTDPSNLGGQPLGGPGSRPKKKLSPPSIT

SEQ ID NO: 33343 - protein, 139 aa, Homo sapiens
  MAP TO AC002310.1; EXPRESSED IN BRAIN, SIGNAL =   1; EXPRESSED IN HELA, SIGNAL = 1.1
LWPQLQLPFPPGQPPAGPLRGAALLLRPVSGAFLPAQVPAPASVHPHRREALPLPRLRAPLPPEGFPGYPQAGSHRGEALRVLRLQESLHLPLPAGHPPAQAHGREALQLPRLQPPFRLHLPAGHPQAHTHRREALPLS

SEQ ID NO: 33344 - protein, 290 aa, Homo sapiens
  MAP TO AC002310.1; EXPRESSED IN BRAIN, SIGNAL =   1; EXPRESSED IN HELA, SIGNAL = 1.1; SWISSPROT HIT: Q07230, EVALUE 2.00e-55
GNEEKERLKKCPKQKEVAHEVAVKEWWPSVACPEFCNPRQSPMNPWLKDTLTRRLPHSCPDCGRNFSYPSLLASHQRVHSGERPFSCGQCQARFSQRRYLLQHQFIHTGEKPYPCPDCGRRFRQRGSLAIHRRAHTGEKPYACSDCKSRFTYPYLLAIHQRKHTGEKPYSCPDCSLRFAYTSLLAIHRRIHTGEKPYPCPDCGRRFTYSSLLLSHRRIHSDSRPFPCVECGKGFKRKTALEAHRWIHRSCSERRAWQQAVVGRSEPIPVLGGKDPPVHFRHFPDIFQECG

SEQ ID NO: 33345 - protein, 20 aa, Homo sapiens
  MAP TO AC000113.1; EXPRESSED IN HELA, SIGNAL = 1.6; EXPRESSED IN BRAIN, SIGNAL = 0.78; EXPRESSED IN LUNG, SIGNAL = 0.92
LHGRHGHPSRILGAHWLTEH

SEQ ID NO: 33346 - protein, 164 aa, Homo sapiens
  MAP TO X66401.1; EXPRESSED IN PLACENTA, SIGNAL = 1.4; EXPRESSED IN HELA, SIGNAL =   1; EXPRESSED IN BRAIN, SIGNAL = 1.3; EXPRESSED IN FETAL LIVER, SIGNAL = 1.6; EXPRESSED IN LUNG, SIGNAL = 1.4; EXPRESSED IN HEART, SIGNAL = 1.6; SWISSPROT HIT: Q03519, EVALUE 2.00e-17
MRLPDLRPWTSLLLVDAALLWLLQGPLGTLLPQGLPGLWLEGTLRLGGLWGLLKLRGLLGFVGTLLLPLCLATPLTVSLRALVAGASRAPPARVASAPWSWLLVGYGAAGLSWSLWAVLSPPGAQEKEQDQVNNKVLMWRLLKLSRPDLPLLVAAFFFLVLAVL

SEQ ID NO: 33347 - protein, 163 aa, Homo sapiens
  MAP TO AL157773.3; EXPRESSED IN HELA, SIGNAL = 1.4; EXPRESSED IN BRAIN, SIGNAL = 1.1; EXPRESSED IN LUNG, SIGNAL = 1.2; EXPRESSED IN HEART, SIGNAL = 1.6; SWISSPROT HIT: Q9P2N7, EVALUE 7.00e-33
YDPRFNTWIHLASMNQKRTHFSLSVFNGLVYAAGGRNAEGSLASLECYVPSTNQWQPKTPLEVARCCHASAVADGRVLVTGGYIANAYSRSVCAYDPASDSWQELPNLSTPRGWHCAVTLSDRVYVMGGSQLGPRGERVDVLTVECYSPATGQWSYAAPLQVG

SEQ ID NO: 33348 - protein, 273 aa, Homo sapiens
  MAP TO AL109754.13; EXPRESSED IN HELA, SIGNAL = 0.76; EXPRESSED IN BRAIN, SIGNAL = 0.94; SWISSPROT HIT: P28492, EVALUE 2.00e-03
CDLKWKNLDHKTPRAVAKEGGFKAASKEIRRAERIANKLARPGAKNPNPLWALRLHDWSVEREAFLREAFAVLDRGDGSISKNDFVMVLEERQDYASSEQLAAIAHLHEKTRGGGVNINEFFKGTRYLNKSFVLGSYGPKKKEKGMGKKGKKGKFVLPLPICVIPEYAFPRRQDGGPPYYMIETYKNVTDSSRFNRDHPPEHPIQDDSVWYIDDSEKVFSNINIITKAGDLASLKKAFESGIPVDMKDNYYKTPLMTACASGNIDVVKFLLEK

SEQ ID NO: 33349 - protein, 1237 aa, Homo sapiens
  MAP TO AL121907.2; EXPRESSED IN HEART, SIGNAL = 2.7; EXPRESSED IN LUNG, SIGNAL = 2.2; EXPRESSED IN FETAL LIVER, SIGNAL = 1.5; EXPRESSED IN HELA, SIGNAL = 0.67; EXPRESSED IN BRAIN, SIGNAL = 1.9; SWISSPROT HIT: O84402, EVALUE 5.00e-24
RQFRVVVLSTVHTCQSLLSPGALAPEFFTDARVLNTVLTRAQSQLVVVGDAVALCSFGACGKLWESFIRECVERHSVCPEGLSMEQVEQGVAQRRRWPPRGTQAGAAGNWEAAPEPVGDLAEEQAAVVTAMVKAEPGDEALSPASRDITATTAQTEAAAAPAGDAVKEDVVPGACAAGAAAAAGVESTEAEDAEADFWPWDGELNADDAILRELLDESQKVMVTVGEDGLLDTVARPESLQQARLYENLPPAALRKLLHAEPERYRHCSFVPETFERASAIPLDDASSGPIQVRGRLDCGMAFAGDEVLVQLLSGDKAPEGRLRGRVLGVLKRKRHELAFVCRMDTWDPRIMVPINGSVTKIFVAELKDPSQVPIYSLRKGRLQRVGLERLTAEARHSRLFWVQIVLWRQGFYYPLGIVREVLPEASTWEQGLRILGLEYSLRVPPSDQATITKVLQKYHTELGRVAGRREDCRAFLTFTVDPQGACNLDDALSVRDLGPRCEVAVHITDVASFVPRDGVLDVEARRQGAAFYAPGREPVPMLPASLCQDVLSLLPGRDRLAISLFLTMEKASGQLKSLRFAPSVVQSDRQLSYEEAEEVIRQHPGAGRELPARLDSVDACVVAACYFSRLLRRHRLRSDCFYEQPDEDGTLGFRAAHIMVKEYMIQFNRLVAEFLVGSECTRTVTPLRWQPAPRSQQLKALCEKHGDRVPLSLHLGHHLHGGGGSPPDTRLHLLASLWKQVQFAARTQDYEQMVDLVTTDDMHPFLAPAGRDLRKALERSAFGRCARGHQQQGGHYSLQVDWYTWATSPIRRYLDVVLQRQILLALGHGGSAYSARDIDGLCQAFSLQHALAQSYQRRARSLHLAVQLKAQPLDKLGFVVDVEAGSRCFRLLFPSNRETLPDPCPVPYGSLQLAEHPHALAGRPGLRLLWRRRVYSAQGSSPPLPLPGTVPDPHTLAVETALWKQLLELVELQRWPEAAALIQEKGEASQRRELVQVQRSHCGHFLEVARELGSGDTLQVQLGTSLQHGFLVPSPQLWTVAPGFSLCLEHVERPGDCFSGRVYRAPRDRYRDVDEYACVWEPFCALESATGAVAENDSVTLQHLSVSWEASRTPQGQLQGAFRLEAAFLEENCADINFSCCYLCIRLEGLPAPTASPRPGPSSLGPGLNVDPGTYTWVAHGQTQDWDQERRADRQEAPRRVHLFVHHMGMEKVPEEVLRPGTLFTVELLPKQLPDL

SEQ ID NO: 33350 - protein, 533 aa, Homo sapiens
  MAP TO AC010130.2; EXPRESSED IN BRAIN, SIGNAL = 1.8; EXPRESSED IN HELA, SIGNAL = 0.45; EXPRESSED IN LUNG, SIGNAL = 1.4; SWISSPROT HIT: O60315, EVALUE 0.00e+00
EKPYECPNCKKRFSHSGSYSSHISSKKCIGLISVNGRMRNNIKTGSSPNSVSSSPTNSAITQLRNKLENGKPLSMSEQTGLLKIKTEPLDFNDYKVLMATHGFSGTSPFMNGGLGATSPLGVHPSAQSPMQHLGVGMEAPLLGFPTMNSNLSEVQKVLQIVDNTVSRQKMDCKAEEISKLKGYHMKDPCSQPEEQGVTSPNIPPVGLPVVSHNGATKSIIDYTLEKVNEAKACLQSLTTDSRRQISNIKKEKLRTLIDLVTDDKMIENHNISTPFSCQFCKESFPGPIPLHQHERYLCKMNEEIKAVLQPHENIVPNKAGVFVDNKALLLSSVLSEKGMTSPINPYKDHMSVLKAYYAMNMEPNSDELLKISIAVGLPQEFVKEWFEQRKVYQYSNSRSPSLERSSKPLAPNSNPPTKDSLLPRSPVKPMDSITSPSIAELHNSVTNCDPPLRLTKPSHFTNIKPVEKLDHSRSNTPSPLNLSSTSSKNSHSSSYTPNSFSSEELQAEPFRLVITKTNERTQKYYSHKEQNKS

SEQ ID NO: 33351 - protein, 17 aa, Homo sapiens
  MAP TO AC010130.2; EXPRESSED IN BRAIN, SIGNAL = 1.8; EXPRESSED IN HELA, SIGNAL = 0.45; EXPRESSED IN LUNG, SIGNAL = 1.4
LPLILFLLLLLIQPLPS

SEQ ID NO: 33352 - protein, 19 aa, Homo sapiens
  MAP TO AC013602.2; EXPRESSED IN BRAIN, SIGNAL = 1.1; EXPRESSED IN HELA, SIGNAL = 1.7; EXPRESSED IN HEART, SIGNAL = 1.2; EXPRESSED IN FETAL LIVER, SIGNAL = 1.2
ERRGCRGRSLSRFWITQKT

SEQ ID NO: 33353 - protein, 208 aa, Homo sapiens
  MAP TO AC013602.2; EXPRESSED IN BRAIN, SIGNAL = 1.1; EXPRESSED IN HELA, SIGNAL = 1.7; EXPRESSED IN HEART, SIGNAL = 1.2; EXPRESSED IN FETAL LIVER, SIGNAL = 1.2; SWISSPROT HIT: P45446, EVALUE 4.70e-02
EKRLQREKSEQVLDNPEDLRGPIHLSVLRQGKSPYKRGFDEGDVHPQAKKKKIDLIFKDVLEASLESAKVEAHQLALSTSLVIRKVPKYQDDAYSQCATTMTHGVQNIGQTQGEGDWKVPQGVSKEPGQLEDEEEEPSSFKADSPAEASLASDPHELPTTSFCPNCIRLKKKVRELQAELDMLKSGKLPEPPVLPPQVLELPEFSDPA

SEQ ID NO: 33354 - protein, 153 aa, Homo sapiens
  MAP TO AC005224.1; EXPRESSED IN BRAIN, SIGNAL = 0.94; EXPRESSED IN FETAL LIVER, SIGNAL = 1.2; EXPRESSED IN HELA, SIGNAL = 1.5; SWISSPROT HIT: Q61909, EVALUE 9.50e-02
MGPALGLAQAMGPAAALRLLQAGEALGLVEVEVLVRDDPLEAQEVLHAAQLPGRVADEPLAAHEEHLADGEVAQPVLQVLGVDADLDGAPRRVDEARCPVFERQALEGGDVGPLGQRLRVVRDGPGHRVPHHHDELGVLGHGRDARRGLPRDE

SEQ ID NO: 33355 - protein, 68 aa, Homo sapiens
  MAP TO AL121997.7; EXPRESSED IN BRAIN, SIGNAL = 0.93; EXPRESSED IN HELA, SIGNAL = 1.7; EXPRESSED IN FETAL LIVER, SIGNAL = 0.97; SWISSPROT HIT: Q99698, EVALUE 4.00e-34
KVCKFDVTLNHNSPLAASVVPTLTEFLAGFGDCCSLSDNLESRVVSAGWTEEPVALIQRMLFRTVLHL

SEQ ID NO: 33356 - protein, 429 aa, Homo sapiens
  MAP TO AC005764.1; EXPRESSED IN BRAIN, SIGNAL = 0.78; EXPRESSED IN HELA, SIGNAL = 0.34; SWISSPROT HIT: Q9NVW2, EVALUE 5.00e-10
MPLCRPEHLMPRASRVPVAASLPLSHAVIPTQLPSRPGHRPPGRPRRCPKASCLPPPVGPSSTQTAKRVTMGWPRPGRALVAVKALLVLSLLQVPAQAVVRAVLEDNSSSVDFADLPALFGVPLAPEGIRGYLMEVKPANACHPIEAPRLGNRSLGAIVLIRRYDCTFDLKVLNAQRAGFEAAIVHNVHSDDLVSMTHVYEDLRGQIAIPSVFVSEAASQDLRVILGCNKSAHALLLPDDPPCHDLGCHPVLTVSWVLGCTLALVVSAFFVLNHLWLWAQACCSHRRPVKTSTCQKAQVRTFTWHNDLCAICLDEYEEGDQLKILPCSHTYHCKCIDPWFSQAPRRSCPVCKQSVAATEDSFDSTTYSFRDEDPSLPGHRPPIWAIQVQLRSRRLELLGRASPHCHCSTTSLEAEYTTVSSAPPEAPGQ

SEQ ID NO: 33357 - protein, 104 aa, Homo sapiens
  MAP TO AF030453.1; EXPRESSED IN PLACENTA, SIGNAL = 1.5; EXPRESSED IN BRAIN, SIGNAL = 1.4; EXPRESSED IN LUNG, SIGNAL = 1.4; EXPRESSED IN FETAL LIVER, SIGNAL = 1.5
MSLCVVDGVRDMWHRRASPEPDAAAAPRTAEPRDKWTRRLRLSRTLAAKVELVDIQREGALRFMVADDAAAGSGGSAQWQKCRLLLRRAVAEERFRLEFFVPPK

SEQ ID NO: 33358 - protein, 101 aa, Homo sapiens
  MAP TO AF030453.1; EXPRESSED IN PLACENTA, SIGNAL = 1.5; EXPRESSED IN BRAIN, SIGNAL = 1.4; EXPRESSED IN LUNG, SIGNAL = 1.4; EXPRESSED IN FETAL LIVER, SIGNAL = 1.5; SWISSPROT HIT: Q9UYI6, EVALUE 1.50e+00
AHKFCRFLRDNPAYDTPDAGASFSRHFAANFLDVFGEEVRRVLVAGPTTRGAAVSAEAMEPELADTSALKAAPTATRGARRTCPRTRPPRPAFARASRCAT

SEQ ID NO: 33359 - protein, 92 aa, Homo sapiens
  MAP TO AL008726.1; EXPRESSED IN BRAIN, SIGNAL = 1.3
RAAGPGPGLPGRDRGERAGLVRTSASRSDRAGPRQSGPRSRVFSARSGQPGPHLGLRHHAPPQPRAPGGPPGGGGSGPQPTSNPPRGTISAH

SEQ ID NO: 33360 - protein, 151 aa, Homo sapiens
  MAP TO U66083.1; EXPRESSED IN PLACENTA, SIGNAL = 1.5; EXPRESSED IN BRAIN, SIGNAL = 0.8; EXPRESSED IN HELA, SIGNAL = 0.33; SWISSPROT HIT: P43362, EVALUE 7.00e-79
  unsure 2
VXEVDPAGHSYILVTALGLSCDSMLGDGHSMPKAALLIIVLGVILTKDNCAPEEVIWEALSVMGVYVGKEHMFYGEPRKLLTQDWVQENYLEYRQVPGSDPAHYEFLWGSKAHAETSYEKVINYLVMLNAREPICYPSLYEEVLGEEQEGV

SEQ ID NO: 33361 - protein, 25 aa, Homo sapiens
  MAP TO Z79996.2; EXPRESSED IN LUNG, SIGNAL =   1; EXPRESSED IN FETAL LIVER, SIGNAL = 0.98; EXPRESSED IN BRAIN, SIGNAL = 0.82; EXPRESSED IN HELA, SIGNAL = 0.86
MRMTLLCVKTWSYKTEICPPKKKYF

SEQ ID NO: 33362 - protein, 278 aa, Homo sapiens
  MAP TO Z79996.2; EXPRESSED IN LUNG, SIGNAL =   1; EXPRESSED IN FETAL LIVER, SIGNAL = 0.98; EXPRESSED IN BRAIN, SIGNAL = 0.82; EXPRESSED IN HELA, SIGNAL = 0.86; SWISSPROT HIT: O95236, EVALUE 1.00e-23
DEDDAPLCEDVELQDGDLSPEEKIFLREFPRLKEDLKGNIDKLRALADDIDKTHKKFTKANMVATSTAVISGVMSLLGLALAPATGGGSLLLSTAGQGLATAAGVTSIVSGTLERSKNKEAQARAEDILPTYDQEDREDEEEKADYVTAAGKIIYNLRNTLKYAKKNVRAFWKLRANPRLANATKRLLTTGQVSSRSRVQVQKAFAGTTLAMTKNARVLGGVMSAFSLGYDLATLSKEWKHLKEGARTKFAEELRAKALELERKLTELTQLYKSLQQK

SEQ ID NO: 33363 - protein, 243 aa, Homo sapiens
  MAP TO AC008770.3; EXPRESSED IN LUNG, SIGNAL = 0.99; EXPRESSED IN BRAIN, SIGNAL = 0.97; EXPRESSED IN HELA, SIGNAL = 1.4; SWISSPROT HIT: P17024, EVALUE 8.00e-98
RMPSGERPYKCSICEKGFYSAKSFQTHEKTHTGEKPYECNQCGKAFRCCNSLRYHERTHTGEKPYECKQCGKAFRSASHLRMHERTHTGEKPYECKQCGKAFSCASNLRKHGRTHTGEKPYECKQCGKAFRSASNLQMHERTHTGEKPYECKECEKAFCKFSSFQIHERKHRGEKPYECKHCGNGFTSAKILQIHARTHIGEKHYECKECGKAFNYFSSLHIHARTHMGEKPYECKDCGKAFS

SEQ ID NO: 33364 - protein, 60 aa, Homo sapiens
  MAP TO AC002511.1; EXPRESSED IN HELA, SIGNAL = 2.7; EXPRESSED IN BRAIN, SIGNAL = 1.7; EXPRESSED IN HEART, SIGNAL = 1.5
WPPPWIQAPTSPTSPAITGSSSRCTFSLSWWGSPSTCWPWWSSWASCGAARWPWTCSCST

SEQ ID NO: 33365 - protein, 185 aa, Homo sapiens
  MAP TO AC010198.8; EXPRESSED IN BRAIN, SIGNAL = 0.9; EXPRESSED IN HELA, SIGNAL = 1.4; EXPRESSED IN LUNG, SIGNAL = 0.93; SWISSPROT HIT: P19246, EVALUE 1.10e-01
FLNRRYMTEVDYSNKQGEEQPWEADYARKPNLPKRWDMLTEPDGQEKKQESFKSWEASGKHQEVSKPAVSLEQRKQDTSKLRSTLPEEQKKQEISKSKPSPSQWKQDTPKSKAGYVQEEQKKQETPKLWPVQLQKEQDPKKQTPKSWTPSMQSEQNTTKSWTTPMCEEQDSKQPETPKSWENNVE

SEQ ID NO: 33366 - protein, 769 aa, Homo sapiens
  MAP TO AC005028.1; EXPRESSED IN HEART, SIGNAL = 1.2; EXPRESSED IN LUNG, SIGNAL = 1.2; EXPRESSED IN FETAL LIVER, SIGNAL = 1.1; EXPRESSED IN BRAIN, SIGNAL =   1; EXPRESSED IN HELA, SIGNAL = 0.58; SWISSPROT HIT: P10071, EVALUE 0.00e+00
TQSNNTCSLGGPMTLLPGRSDLSGVDVTMLNMLNRRDSSASTISSAYLSSRRSSGISPCFSSRRSSEASQAEGRPQNVSVADSYDPISTDASRRSSEASQSDGLPSLLSLTPAQQYRLKAKYAAATGGPPPTPLPNMERMSLKTRLALLGDALEPGVALPPVHAPRRCSDGGAHGYGRRHLQPHDAPGHGVRRASDPVRTGSEGLALPRVPRFSSLSSCNPPAMATSAEKRSLVLQNYTRPEGGQSRNFHSSPCPPSITENVTLESLTMDADANLNDEDFLPDDVVQYLNSQNQAGYEQHFPSALPDDSKVPHGPGDFDAPGLPDSHAGQQFHALEQPCPEGSKTDLPIQWNEVSSGSADLSSSKLKCGPRPAVPQTRAFGFCNGMVVHPQNPLRSGPAGGYQTLGENSNPYGGPEHLMLHNSPGSGTSGNAFHEQPCKAPQYGNCLNRQPVAPGALDGACGAGIQASKLKSTPMQGSGGQLNFGLPVAPNESAGSMVNGMQNQDPVGQGYLAHQLLGDSMQHPGAGRPGQQMLGQISATSHINIYQGPESCLPGAHGMGSQPSSLAVVRGYQPCASFGGSRRQAMPRDSLALQSGQLSDTSQTCRVNGIKMEMKGQPHPLCSNLQNYSGQFYDQTVGFSQQDTKAGSFSISDASCLLQGTSAKNSELLSPGANQVTSTVDSLDSHDLEGVQIDFDAIIDDGDHSSLMSGALSPSIIQNLSHSSSRLTTPRASLPFPALSMSTTNMAIGDMSSLLTSLAEESKFLAVMQ

SEQ ID NO: 33367 - protein, 141 aa, Homo sapiens
  MAP TO AC011465.4; EXPRESSED IN LUNG, SIGNAL = 1.1; EXPRESSED IN HELA, SIGNAL = 0.99; EXPRESSED IN BRAIN, SIGNAL = 0.83; SWISSPROT HIT: P46062, EVALUE 1.00e-22
MATRTRQEYLKDLAENCVSNTPIDSTGKFNLISLTSKKKEKTKARAGAEQHSAGAIAWRVVAQDYAQGVEIDCILGISNEFVVLLDLRTKEVVFNCYCGDVIGWTPDSSTLKIFYGRGDHIFLQATEGSVEDIREIVQRLK

SEQ ID NO: 33368 - protein, 29 aa, Homo sapiens
  MAP TO AC011465.4; EXPRESSED IN LUNG, SIGNAL = 1.1; EXPRESSED IN HELA, SIGNAL = 0.99; EXPRESSED IN BRAIN, SIGNAL = 0.83; SWISSPROT HIT: P16382, EVALUE 3.00e+00
KTLLLSAPPSPVEPHSANPTSSETSCWPR

SEQ ID NO: 33369 - protein, 359 aa, Homo sapiens
  MAP TO AC008543.4; EXPRESSED IN FETAL LIVER, SIGNAL = 2.4; EXPRESSED IN HEART, SIGNAL = 1.9; EXPRESSED IN BRAIN, SIGNAL = 2.9; EXPRESSED IN HELA, SIGNAL = 1.5; SWISSPROT HIT: P17024, EVALUE 0.00e+00
NHMAERLCECKDGQCGETFSLIPDGIMNKNTLPGVKPCESSVCGEGNVDHSSLNCYIRADTGHKPYECQEHGEKPHKCKQCVKTFSCLHSFQTHEKPHTGEKPYDCKEWEKTFDSPQTVRRYRVVHSGDGPYKCKFCGKAFDNLSLYLTHERSHTGQKPYECNECGKAFGFPSSFHRHERMHTGEKPYECKQCGKTFSCSSSIKKHERIHTGEKPYECKQCGKAFASSNSFQYHERTHTGEKPYECKQCGKAFNCSSSLRKHARIHTGEKPYICKQCGKAFRFPSSIKNHEKTHTGEKPYECQECGKAFRYSSSLRVHKRIHTGEKPYECEDCGKAFSHPTTFHRHKITHTAEKPYECQ

SEQ ID NO: 33370 - protein, 20 aa, Homo sapiens
  MAP TO AC008543.4; EXPRESSED IN FETAL LIVER, SIGNAL = 2.4; EXPRESSED IN HEART, SIGNAL = 1.9; EXPRESSED IN BRAIN, SIGNAL = 2.9; EXPRESSED IN HELA, SIGNAL = 1.5
IIWQRDSVNVKMVNVEKLSA

SEQ ID NO: 33371 - protein, 156 aa, Homo sapiens
  MAP TO AC008543.4; EXPRESSED IN FETAL LIVER, SIGNAL = 2.4; EXPRESSED IN HEART, SIGNAL = 1.9; EXPRESSED IN BRAIN, SIGNAL = 2.9; EXPRESSED IN HELA, SIGNAL = 1.5; SWISSPROT HIT: P57105, EVALUE 3.10e+00
PFIDMKECTPGRNHMNVSNVGKPLVVPVPLKNMKESTLERSPMNASNVGKPSLLPIPFSIMKGLTLERNPMNVSNVGKPLIVPVPLENMQEFTLERNPIYVNNVVKLLDFPVLLKIMKRLTLERSPMNVRNVGKPSDIPVHFEYIKEFTLERSRMN

SEQ ID NO: 33372 - protein, 249 aa, Homo sapiens
  MAP TO AL135838.2; EXPRESSED IN HEART, SIGNAL = 2.3; EXPRESSED IN PLACENTA, SIGNAL = 1.6; EXPRESSED IN BRAIN, SIGNAL = 3.2; EXPRESSED IN HELA, SIGNAL = 0.69; SWISSPROT HIT: O43772, EVALUE 1.00e-25
VLGLYKGLGSPLMGLTFINALVFGVQGNTLRALGHDSPLNQFLAGAAAGAIQCVICCPMELAKTRLQLQDAGPARTYKGSLDCLAQIYGHEGLRGVNRGMVSTLLRETPSFGVYFLTYDALTRALGCEPGDRLLVPKLLLAGGTSGIVSWLSTYPVDVVKSRLQADGLRGAPRYRGILDCVHQSYRAEGWRVFTRGLASTLLRAFPVNAATFATVTVVLTYARGEEAGPEGEAVPAAPAGPALAQPSSL

SEQ ID NO: 33373 - protein, 249 aa, Homo sapiens
  MAP TO AL135838.2; EXPRESSED IN HEART, SIGNAL = 2.3; EXPRESSED IN PLACENTA, SIGNAL = 1.6; EXPRESSED IN BRAIN, SIGNAL = 3.2; EXPRESSED IN HELA, SIGNAL = 0.69; SWISSPROT HIT: P13889, EVALUE 6.30e+00
CWACTRAWARRSWGSPSSTRWCSGCRATPSGPWATTRPSTSSWQVRRRAPSSASSAAPWSWPRRGCSCRTRAQRAPTRARWTASRRSTGTRVCVASTGAWCPRCCVRRPASASTSSPMTLSRGRWAASRATACWCPSCCWRAVRQASCPGSLPILWTWSSRGCRRTDCGAPRATAASWTACTRATAPRAGASSHGGWRPRCCAPSPSTLPPSPPSRWCSPTRAARRPGPRARLCPPPLRGLPWRSPPAC

SEQ ID NO: 33374 - protein, 260 aa, Homo sapiens
  MAP TO AF107256.1; EXPRESSED IN HELA, SIGNAL = 1.5; EXPRESSED IN BRAIN, SIGNAL = 2.2; SWISSPROT HIT: O15197, EVALUE 0.00e+00
WDEVSVLDDQRRLTRTFEACHVAGAPPGTGQDNWLQTHFVERRGAQRAHIRLHFSVRACSSLGVSGGTCRETFTLYYRQAEEPDSPDSVSSWHLKRWTKVDTIAADESFPSSSSSSSSSSSAAWAVGPHGAGQRAGLQLNVKERSFGPLTQRGFYVAFQDTGACLALVAVRLFSYTCPAVLRSFASFPETQASGAGGASLVAAVGTCVAHAEPEEDGVGGQAGGSPPRLHCNGEGKWMVAVGGCRCQPGYQPARGDKACQ

SEQ ID NO: 33375 - protein, 169 aa, Homo sapiens
  MAP TO AC005538.2; EXPRESSED IN HELA, SIGNAL = 1.3; EXPRESSED IN BRAIN, SIGNAL = 0.86; SWISSPROT HIT: P50536, EVALUE 6.00e-06
LSIEEKNENDENSLSSSSDSSEDKDEKISEECDIEEKTEVKEEPELQTKREMEERTVTLEIPEVLKRQLEDDCYYINRRKRLVQLPCHTNIITILESYVKHFAISAAFSANERPRHHHAMPHASMNVPYIPAEKNIDLCKEMVDGLRITFDYTLPLVLLYPYEQAQYKK

SEQ ID NO: 33376 - protein, 184 aa, Homo sapiens
  MAP TO AC008468.4; EXPRESSED IN BRAIN, SIGNAL = 1.1; EXPRESSED IN HELA, SIGNAL = 0.33; SWISSPROT HIT: Q9UN75, EVALUE 1.00e-102
VSVEVADVNDNAPAFAQPEYTVFVKENNPPGCHIFTVSAWDADAQKNALVSYSLVERRVGEHALSSYVSVHAESGKVYALQPLDHEELELLQFQVSARDAGVPPLGSNVTLQVFVLDENDNAPALLATPAGSAGGAVSELVPRSVGAGHVVAKVRAVDADSGYNAWLSYELQPAAVGAHIPFHV

SEQ ID NO: 33377 - protein, 355 aa, Homo sapiens
  MAP TO AL049732.11; EXPRESSED IN BRAIN, SIGNAL = 1.3; EXPRESSED IN HELA, SIGNAL = 0.87; EXPRESSED IN LUNG, SIGNAL =   1; SWISSPROT HIT: P28968, EVALUE 2.20e-02
MDPPVVNRPKKSKTKKAPIKTITKAAPAAPPVPAANEIATNKPKITWQALNLPVITQISQALPTTEVTNTQASSVTAQPKKANKMKRVTAKAAQGSQSPTGHEGGTIQLKSPLQVLKLPVISQNIHAPIANESASSQALITSIKPKKASKAKKAANKAIASATEVSLAATATHTATTQGQITNETASIHTTAASIRTKKASKARKTIAKVINTDTEHIEALNVTDAATRQIEASVVAIRPKKSKGKKAASRGPNSVSEISEAPLATQIVTNQALAATLRVKRGSRARKAATKARATESQTPNADQGAQAKIASAQTNVSALETQVAAAVQALADDYLAQLSLEPTTRTRGKRNRK

SEQ ID NO: 33378 - protein, 30 aa, Homo sapiens
  MAP TO AL049732.11; EXPRESSED IN BRAIN, SIGNAL = 1.3; EXPRESSED IN HELA, SIGNAL = 0.87; EXPRESSED IN LUNG, SIGNAL =   1; SWISSPROT HIT: P54580, EVALUE 8.70e+00
IPCWRQPRTPWPWTHQLSTGLRKARPRRPL

SEQ ID NO: 33379 - protein, 354 aa, Homo sapiens
  MAP TO AL022323.7; EXPRESSED IN PLACENTA, SIGNAL = 1.5; EXPRESSED IN HELA, SIGNAL = 0.34; EXPRESSED IN BRAIN, SIGNAL = 0.88; EXPRESSED IN HEART, SIGNAL = 1.4; EXPRESSED IN LUNG, SIGNAL = 0.96; SWISSPROT HIT: P24152, EVALUE 1.00e-05
GPRTSSPLFNKAVFLRPSSSTMILFETTKSGPALGKAVSEGAEEAKLGVSGSRPEVAAKPALPTQKPAGTLPRSAPLSQDTKPPVPQEEAGQDHPPSKASSVEDTARPLVEPRPRLKRRPVSAIFTESIQPQKPGPGAAATVGKVPPTPPEKTWVRKPRPLSMDLTARFENKEALLRKVADEGSGPTAGDMAGLERPRAASKLDRDCLVKAEAPLHDPDLDFLEVAKKIRERKEKMLSKPEMGSPRALVGGSSGVTPSNDQSPWEEKAKLDPEPEKAAESPSPRLGRGLELAEVKSRVADGEAAAGGEWASRRSVRKCISLFREDSTLALAVGSESPLATPASPSAAPEPEKGV

SEQ ID NO: 33380 - protein, 163 aa, Homo sapiens
  MAP TO AC005063.1; EXPRESSED IN HELA, SIGNAL = 0.48; EXPRESSED IN BRAIN, SIGNAL = 1.5; SWISSPROT HIT: Q9V0B9, EVALUE 8.50e-01
VCEKFQAALALSRVELHKNPEKEPYKSKYSARALLEEVKALLGPAPEDEDERPEAEDSPGAGDHALGLPAEVVEPEDAVAQRAVRLAVIEFHLGVNHIDTEELSAGEEHLVKCLRLLRRYRLSHDCISLCIQAQVRASPARPAPVGKWRGMGRSPCQGQGQTL

SEQ ID NO: 33381 - protein, 268 aa, Homo sapiens
  MAP TO AP000505.1; EXPRESSED IN BRAIN, SIGNAL = 0.9; EXPRESSED IN HELA, SIGNAL = 0.8; EXPRESSED IN LUNG, SIGNAL = 1.6; SWISSPROT HIT: P08392, EVALUE 2.00e-01
VLRLHDSSARFPTRFTTFCRSCPLLRSSPQCSFFFPPVQAKAGLEVPTTAFCTPHPCSLGPQLALIPETAPSLLPRPGSAPAGAKSRHFPRSPKPLGSHSQERVGPCLRRRSAEGAGARLGDDEGTGVSDERDAVLGRRGAGAPAGRPLLPLLSRRLPGPGAPWRRGPPGPLGHAAQLSVPGGGRLRAGHSRAAARGRRDGDSSAGPGQETRVRASLVHERGVRRPGAAPEGREGVRQHQSPRYGGLREREDLLWGRDGGVREYECVV

SEQ ID NO: 33382 - protein, 179 aa, Homo sapiens
  MAP TO AF188030.1; EXPRESSED IN BRAIN, SIGNAL = 0.95; SWISSPROT HIT: Q06666, EVALUE 2.00e-02
SSHRYAEYHVHLLQKKLPALGKETIRPWFKRGTEAGRRIRPWFKRGTEAGRRIRPWFKRGTEAGRRIRPWFKRGTEAGRRIRPWFKRGTEAGRRIRPWFKRGTEPGRRIRPWFKRGTEAGRRIRPWFKRGTEAGRRIRPWFKRGTEAGRWIWPWFKQYRGREAARGSGEQEEAGCSSAA

SEQ ID NO: 33383 - protein, 260 aa, Homo sapiens
  MAP TO AC006014.2; EXPRESSED IN LUNG, SIGNAL =   1; EXPRESSED IN BRAIN, SIGNAL = 0.94
VLLNVRVGWLLVAGAEVARVLPKPLKSAALLLVAVGTAVGRDWLKVVTVVVVGKAGGLPNWNMEPMAGVKLAAEAWGAPKRKGCEAAVAVLVVVLTLLLLTLFMPKPNAGFEAESVDGLAEVMGATAEVALARPVKSGAVVVGAVAGVVVCLKKGAGKGTDAGGPMLLKTGWKVGAVVLVVVGREELEGAVAVTEGPGGVGPSFSLLGGAVKMGLNMGDAEDAAGAAGLEGEVFCVPNRKLCLGAGDGADVAWGLVAVSA

SEQ ID NO: 33384 - protein, 253 aa, Homo sapiens
  MAP TO AL009030.4; EXPRESSED IN PLACENTA, SIGNAL = 4.7; EXPRESSED IN BRAIN, SIGNAL = 5.6; EXPRESSED IN HEART, SIGNAL = 6.2; SWISSPROT HIT: P52591, EVALUE 1.20e-02
  unsure 56
  unsure 171
APTMDAQQDRPKSQDCLGLVAPLASAAEVPSTAPVSGKKHRPPGPLFSSSDPLPAXSSHSRDSAQVTSLIPATFTAASRDAGMRRTRPGTSAPAAAAAALPPSTLNPTSGSLLNAVDGGPSHFLASATAAARAQRSEVRYNQRSQTSRTRSCLKRNASSSSHSSTEGLQEXKRRRGPASSHCQLAHSSSNTVSEDGPQAVSSGHRCENKAGTAPGQTLAPRGGSPRSQASRPRINSALHVEDKAISDCRPSRP

SEQ ID NO: 33385 - protein, 245 aa, Homo sapiens
  MAP TO AP000563.1; EXPRESSED IN HELA, SIGNAL = 0.7; EXPRESSED IN BRAIN, SIGNAL = 1.6; EXPRESSED IN HEART, SIGNAL = 1.6; EXPRESSED IN LUNG, SIGNAL = 1.2; EXPRESSED IN FETAL LIVER, SIGNAL = 1.4; SWISSPROT HIT: Q57814, EVALUE 3.40e+00
SKTLFRNNNNKRKVISAMAMTSVKLLAIVLRKPDTWIGLWGVLRGTPSSHKLCTSWNRYSTKLCAPNYKRLIHNIFSLKFSGLLISPEYIFPFSIRLKSNKSSNKSTTKSLQKVEDEEDSEEDSNHDEMSEQEEELEDDPTIVKDYQDLEKAVQSFWYDDVLKTGLDIGRNKVEDAFYKGELRLNGEKLWKKNRTVKVGDTLDLLIGDLLDPMYLGDILDLLFGEDKEGGTETVMRILLKKVFED

SEQ ID NO: 33386 - protein, 75 aa, Homo sapiens
  MAP TO AL121906.18; EXPRESSED IN FETAL LIVER, SIGNAL = 1.3; EXPRESSED IN LUNG, SIGNAL = 1.2; EXPRESSED IN HEART, SIGNAL = 1.7; EXPRESSED IN BRAIN, SIGNAL = 1.3; EXPRESSED IN HELA, SIGNAL = 0.23
QRPGGIGPTKPSGAEERSLQPRGWAEPEGGVGVGEPPRAPAVLPGPHRGGGGPGLGLHQGGLRGREPAAHSAEEL

SEQ ID NO: 33387 - protein, 191 aa, Homo sapiens
  MAP TO AC009948.2; EXPRESSED IN BRAIN, SIGNAL =   1; EXPRESSED IN HELA, SIGNAL = 1.5; SWISSPROT HIT: P11799, EVALUE 4.00e-17
GEAPGIRKEMKDVTTKLGEAAQLSCQIVGRPLPDIKWYRFGKELIQSRKYKMSSDGRTHTLTVMTEEQEDEGVYTCIATNEVGEVETSSKLLLQATPQFHPGYPLKEKYYGAVGSTLRLHVMYIGRPVPAMTWFHGQKLLQNSENITIENTEHYTHLVMKNVQRKTHAGKYKVQLSNVFGTVDAILDVEIQ

SEQ ID NO: 33388 - protein, 242 aa, Homo sapiens
  MAP TO AP001711.1; EXPRESSED IN BRAIN, SIGNAL = 0.87; EXPRESSED IN HELA, SIGNAL = 0.72
QNVPGTGTEAPGILAAVSRGGSGRTPAHPRPAVLTRDGRPGSPRRGRARCGAAVPLGLRAPRRPRSCRAARPTAAALLCRPRSNPLVVCQSELSGPLRLRPRGPGRGSPWETELRLGRLTIAPPPASQSEAVDAGAGRSELGCRATMGARRVSAPQPGSERAAGGARAARAPEMPSCEAPSARPGEIARRQRRRGGPGDDQGAPNKAALGGPEASASLGDRSAKLPVISHRWRWPMACTDGA

SEQ ID NO: 33389 - protein, 205 aa, Homo sapiens
  MAP TO AC001237.1; EXPRESSED IN LUNG, SIGNAL = 1.8; EXPRESSED IN BRAIN, SIGNAL = 1.3; EXPRESSED IN HELA, SIGNAL = 1.9; SWISSPROT HIT: Q9QXZ0, EVALUE 1.60e-02
MSVDPMTYEAQFFGFTPQTCMLRIYIAFQDYLFEVMQAVEQVILKKLDGIPDCDISPVQIRKCTEKFFCFMKGDFDNLFSKMEQLFLQLILRIPSNILLPEDKCKETPYSEEDFQHLQKEIEQLQEKYKTELCTKQALLAELEEQKIVQAKLKQTLTFFDELHNVGRDHGTSDFRESLVSLVQNSRKLQNIRDNVEKESKRLKIS

SEQ ID NO: 33390 - protein, 20 aa, Homo sapiens
  MAP TO AC001237.1; EXPRESSED IN LUNG, SIGNAL = 1.8; EXPRESSED IN BRAIN, SIGNAL = 1.3; EXPRESSED IN HELA, SIGNAL = 1.9
WLHATNVHASDLHCISRLPI

SEQ ID NO: 33391 - protein, 293 aa, Homo sapiens
  MAP TO AC002104.1; EXPRESSED IN BRAIN, SIGNAL = 1.3; EXPRESSED IN HELA, SIGNAL = 1.4; EXPRESSED IN HEART, SIGNAL = 1.7; EXPRESSED IN FETAL LIVER, SIGNAL = 1.5
MGARTGAKWPWGSSRRLDPGARTGAKWPGSGSGKRRRPARGRCPGPTQLPPAPRAPAPRPSRALQPRPGPAQRPRPLFHRRPARRREAQGCDPRRAHPARQAPWEMRGHSQGPAERAQRRSLPHPRPRRPRNRRTRAVPAGGGGATQAEGTLANFAPPEVASRRPGAHPPAARPRPGARPPQPGRLGRRRCDLRVQSARRAARTPPPRGPPARRALTWDICGRKLMSLRSMEPGERLCSSWHRRTPSRSACARSKTTAEGHTTRWLGGRTLQSMSQRPHCRHCSMAPAGPTGS

SEQ ID NO: 33392 - protein, 206 aa, Homo sapiens
  MAP TO AP001479.1; EXPRESSED IN LUNG, SIGNAL = 1.5; EXPRESSED IN HELA, SIGNAL = 0.85; EXPRESSED IN BRAIN, SIGNAL =   1; EXPRESSED IN HEART, SIGNAL = 2.8; SWISSPROT HIT: P12109, EVALUE 1.00e-111
TFSSPADITILLDGSASVGSHNFDTTKRFAKRLAERFLTAGRTDPAHDVRVAVVQYSGTGQQRPERASLQFLQNYTALASAVDAMDFINDATDVNDALGYVTRFYREASSGAAKKRLLLFSDGNSQGATPAAIEKAVQEAQRAGIEIFVVVVGRQVNEPHIRVLVTGKTAEYDVAYGESHLFRVPSYQALLRGVFHQTVSRKVALG

SEQ ID NO: 33393 - protein, 101 aa, Homo sapiens
  MAP TO AP001479.1; EXPRESSED IN LUNG, SIGNAL = 1.5; EXPRESSED IN HELA, SIGNAL = 0.85; EXPRESSED IN BRAIN, SIGNAL =   1; EXPRESSED IN HEART, SIGNAL = 2.8
SRSPPRLTSPSCWTAPPAWAATTLTPPSASPSAWPSASSQRAGRTPPTTCGWRWCSTAARASSAQSGRRCSSCRTTRPWPVPSMPWTLSTTPPTSTMPWAM

SEQ ID NO: 33394 - protein, 409 aa, Homo sapiens
  MAP TO AC013584.3; EXPRESSED IN BRAIN, SIGNAL = 1.1; EXPRESSED IN FETAL LIVER, SIGNAL = 1.2; EXPRESSED IN HEART, SIGNAL = 1.4; EXPRESSED IN LUNG, SIGNAL = 1.1; SWISSPROT HIT: Q9UBP0, EVALUE 1.00e-63
MPDNSISNTNRGNGFDRSAETSSLAFKPTKQLMSSEQQRKFSSQSSRALTPPSYSTAKNSLGSRSSESFGKYTSPVMSEHGDEHRQLLSHPMQGPGLRAATSSNHSVDEQLKNTDTHLIDLVTNEIITQGPPVDWNDIAGLDLVKAVIKEEVLWPVLRSDAFSGLTALPRSILLFGPRGTGKTLLGRCIASQLGATFFKIAGSGLVAKWLGEAEKIIHASFLVARCRQPSVIFVSDIDMLLSSQVNEEHSPVSRMRTEFLMQLDTVLTSAEDQIVVICATSKPEEIDESLRRYFMKRLLIPLPDSTARHQIIVQLLSQHNYCLNDKEFALLVQRTEGFSGLDVAHLCQEAVVGPLHAMPATDLSAIMPSQLRPVTYQDFENAFCKIQPSISQKELDMYVEWNKMFGCSQ

SEQ ID NO: 33395 - protein, 23 aa, Homo sapiens
  MAP TO AC013584.3; EXPRESSED IN BRAIN, SIGNAL = 1.1; EXPRESSED IN FETAL LIVER, SIGNAL = 1.2; EXPRESSED IN HEART, SIGNAL = 1.4; EXPRESSED IN LUNG, SIGNAL = 1.1
CPTTAFQTQIGGMALTEVLKHHP

SEQ ID NO: 33396 - protein, 268 aa, Homo sapiens
  MAP TO AC006544.19; EXPRESSED IN BRAIN, SIGNAL = 0.77; EXPRESSED IN LUNG, SIGNAL =   1; SWISSPROT HIT: P56945, EVALUE 2.00e-03
VMFSFEAGRRCPSGPGTFTFQTAQGNDIFQAVETAIHRQKAQGKAGQGHDVLRADSHEGEVAEGKLPSPPGPQELLDSPPALYAEPLDSLRIAPCPSQDSLYSDPLDSTSAQAGEGVQRKKPLYWDLYEHAQQQLLKAKLTDPKEDPIYDEPEGLAPVPPQGLYDLPREPKDAWWCQARVKEEGYELPYNPATDDYAVPPPRSTKPLLAPKPQGPAFPEPGTATGSGIKSHNSALYSQVQKSGASGSWDCGLSRVGTDKTGVKSEGST

SEQ ID NO: 33397 - protein, 86 aa, Homo sapiens
  MAP TO AC006544.19; EXPRESSED IN BRAIN, SIGNAL = 0.77; EXPRESSED IN LUNG, SIGNAL =   1; SWISSPROT HIT: P28978, EVALUE 6.30e-02
SCSLSRPAAAAPQALEPSPSRRHREMTSSRQLRLPSTGRRPRERPDRGTMFSELTPMKGRWQRGSCLPHLAPKSSSTVPQPCMLSP

SEQ ID NO: 33398 - protein, 50 aa, Homo sapiens
  MAP TO AL139227.1; EXPRESSED IN BRAIN, SIGNAL = 1.1; EXPRESSED IN PLACENTA, SIGNAL = 1.4
MDPLMVSKVCNVTKVFPTVITMVGFHFGKSAFILSERCAVLEIYAVVTAL

SEQ ID NO: 33399 - protein, 221 aa, Homo sapiens
  MAP TO AL121787.22; EXPRESSED IN HELA, SIGNAL = 1.1; EXPRESSED IN BRAIN, SIGNAL = 0.81; SWISSPROT HIT: P97303, EVALUE 2.00e-87
VTARGFGPLLQFAYTAKLLLSRENIREVIRCAEFLRMHNLEDSCFSFLQTQLLNSEDGLFVCRKDAACQRPHEDCENSAGEEEDEEEETMDSETAKMACPRDQMLPEPISFEAAAIPVAEKEEALLPEPDVPTDTKESSEKDALTQYPRYKKYQLACTKNVYNASSHSTSGFASTFREDNSSNSLKPGLARGQIKSEPPSEENEEESITLCLSGDEPDAKD

SEQ ID NO: 33400 - protein, 37 aa, Homo sapiens
  MAP TO AL121787.22; EXPRESSED IN HELA, SIGNAL = 1.1; EXPRESSED IN BRAIN, SIGNAL = 0.81; SWISSPROT HIT: P17053, EVALUE 2.90e+00
PSCYSAEKTSARSSAVLSSCACTTWRTPASASCRPSS

SEQ ID NO: 33401 - protein, 184 aa, Homo sapiens
  MAP TO AL133448.4; EXPRESSED IN LUNG, SIGNAL = 1.9; EXPRESSED IN FETAL LIVER, SIGNAL = 0.94; EXPRESSED IN BRAIN, SIGNAL = 1.1; EXPRESSED IN HELA, SIGNAL = 1.2; SWISSPROT HIT: P14734, EVALUE 9.80e-01
NSVLGNLRSLLQILRQDMTPGGGPGARRRQRGRLMRRLVRRLRRWGLLPRTNTPARASEARSQVTPSAAPLEALDGGTGPAREGGAVGGQDGEQAPPLPIKAPLPSASTSPAPTTVPEAPGPLPSLPLEPSLLSGVVQALRGRLLPSLGPPGPTRSPPGPHTAVLALEDEDDVLLVPLAEPGVW

SEQ ID NO: 33402 - protein, 53 aa, Homo sapiens
  MAP TO AL133448.4; EXPRESSED IN LUNG, SIGNAL = 1.9; EXPRESSED IN FETAL LIVER, SIGNAL = 0.94; EXPRESSED IN BRAIN, SIGNAL = 1.1; EXPRESSED IN HELA, SIGNAL = 1.2; SWISSPROT HIT: Q04592, EVALUE 3.90e-02
SHHYCLEWCRPCEAACCPAWGPQDQPGAPLDPTQQSWPWKMRTMCYWCHWLSR

SEQ ID NO: 33403 - protein, 17 aa, Homo sapiens
  MAP TO AL133448.4; EXPRESSED IN LUNG, SIGNAL = 1.9; EXPRESSED IN FETAL LIVER, SIGNAL = 0.94; EXPRESSED IN BRAIN, SIGNAL = 1.1; EXPRESSED IN HELA, SIGNAL = 1.2
TQCWATCVLCYRSYARI

SEQ ID NO: 33404 - protein, 40 aa, Homo sapiens
  MAP TO AL133448.4; EXPRESSED IN LUNG, SIGNAL = 1.9; EXPRESSED IN FETAL LIVER, SIGNAL = 0.94; EXPRESSED IN BRAIN, SIGNAL = 1.1; EXPRESSED IN HELA, SIGNAL = 1.2; SWISSPROT HIT: Q10586, EVALUE 5.30e-02
AITIVWSGAGPARPPVAQPGAPRTNPEPPWTPHSSPGPGR

SEQ ID NO: 33405 - protein, 212 aa, Homo sapiens
  MAP TO AC004144.1; EXPRESSED IN LUNG, SIGNAL = 1.2; EXPRESSED IN HELA, SIGNAL = 0.98; EXPRESSED IN BRAIN, SIGNAL = 1.2; EXPRESSED IN FETAL LIVER, SIGNAL = 1.4; SWISSPROT HIT: O02626, EVALUE 2.40e-01
PCLTSLASCVPASSVLPTDRNLPTPTSAPTPGLAQGVHAPSTCSYMEATASSRARISRSISLGDSEGPIVATLAQPLRRPSSVGELASLGQELQAITTATTPSLDSEGQEPALRSWGNHEARANLRLTLSSACDGLLQPPVDTQPGVTVPAVSFPAPSPVEESALRLHGSAFRPSLPAPESPGLPAHPSNPQLPEARPGIPGGTASLLEPTS

SEQ ID NO: 33406 - protein, 45 aa, Homo sapiens
  MAP TO AC004144.1; EXPRESSED IN LUNG, SIGNAL = 1.2; EXPRESSED IN HELA, SIGNAL = 0.98; EXPRESSED IN BRAIN, SIGNAL = 1.2; EXPRESSED IN FETAL LIVER, SIGNAL = 1.4; SWISSPROT HIT: Q05236, EVALUE 2.60e-01
HRPLGSWPPWARSFRPSPPRQHPVWTVRAKSLPCVPGATTRPGPT

SEQ ID NO: 33407 - protein, 44 aa, Homo sapiens
  MAP TO AC004144.1; EXPRESSED IN LUNG, SIGNAL = 1.2; EXPRESSED IN HELA, SIGNAL = 0.98; EXPRESSED IN BRAIN, SIGNAL = 1.2; EXPRESSED IN FETAL LIVER, SIGNAL = 1.4; SWISSPROT HIT: Q60648, EVALUE 4.90e+00
QESPNAHICTHPRPGSGCPCPLHLFLHGGHCQLPCQDITQHLPR

SEQ ID NO: 33408 - protein, 178 aa, Homo sapiens
  MAP TO AP001754.1; EXPRESSED IN BRAIN, SIGNAL = 1.3; EXPRESSED IN HELA, SIGNAL = 1.1; EXPRESSED IN LUNG, SIGNAL = 1.1; EXPRESSED IN FETAL LIVER, SIGNAL = 1.1
LSSDQNQCSDLLTVMIVMIVIVMIVTVMIVTVIVMIVTVTVIVMMIVDSDMTAMVTARIVMIVTVIVMIVTVTVMIVDSDMTVMVTARVVMIVTVIVMIVTVTVMIVDSDMTVMVTARIVMIVTVIVMIVTVTVMIVDSDMTVMVTARVVMIVTVIVMIVTVTVMMIVDSDVTVTVRI

SEQ ID NO: 33409 - protein, 519 aa, Homo sapiens
  MAP TO AC007782.20; EXPRESSED IN BRAIN, SIGNAL = 0.9; EXPRESSED IN HELA, SIGNAL = 1.1; SWISSPROT HIT: P32583, EVALUE 4.00e-05
MDSLEEPQKKVFKARKTMRVSDRQQLEAVYKVKEELLKTDVKLLNGNHENGDLDPTSPLENMDYIKDKEEVNGIEEICFDPEGSKAEWKETPCILSVNVKNKQDDDLNCEPLSPHNITPEPVSKLPAEPVSGDPAPGDLDAGDPASGVLASGDSTSGDPTSSEPSSSDAASGDATSGDAPSGDVSPGDATSGDATADDLSSGDPTSSDPIPGEPVPVEPISGDCAADDIASSEITSVDLASGAPASTDPASDDLASGDLSSSELASDDLATGELASDELTSESTFDRTFEPKSVPVCEPVPEIDNIEPSSNKDDDFLEKNGADEKLEQIQSKDSLDEKNKADNNIDANEETLETDDTTICSDRPPENEKKVEEDIITELALGEDAISSSMEIDQGEKNEDETSADLVETINENVIEDNKSENILENTDSMETDEIIPILEKLAPSEDELTCFSKTSLLPIDETNPDLEEKMESSFGSPSKQESSESLPKEAFLVLSDEEDISGEKDESEVISQNETCSP

SEQ ID NO: 33410 - protein, 659 aa, Homo sapiens
  MAP TO AC022423.2; EXPRESSED IN HELA, SIGNAL = 0.52; EXPRESSED IN BRAIN, SIGNAL =   1; SWISSPROT HIT: P42568, EVALUE 9.00e-04
MTPAGAVLPGDPLTSQEQRQGAPGNHSKALEMTGIHAPESSQEPSLLEGADSVSSRAPQASLSMLPSTDNTKEACGHVSGHCCPGGSRESPVTDIDSFIKELDASAARSPSSQTGDSGSQEGSAQGHPPAGAGGGSSCRAEPVPGGQTSSPRRAWAAGAPAYPQWASQPSVLDSINPDKHFTVNKNFLSNYSRNFSSFHEDSTSLSGLGDSTEPSLSSMYGDAEDSSSDPESLTEAPRASARDGWSPPRSRVSLHKEDPSESEEEQIEICSTRGCPNPPSSPAHLPTQAAICPASAKVLSLKYSTPRESVASPREKAACLPGSYTSGPDSSQPSSLLEMSSQEHETHADISTSQNHRPSCAEETTEVTSASSAMENSPLSKVARHFHSPPIILSSPNMVNGLEHDLLDDETLNQYETSINAAASLSSFSVDVPKNGESVLENLHISESQDLDDLLQKPKMIARRPIMAWFKEINKHNQGTHLRSKTEKEQPLMPARSPDSKIQMVSSSQKKGVTVPHSPPQPKTNLENKDLSKKSPAEMLLTNGQKAKCGPKLKRLSLKGKAKVNSEAPAANAVKAGGTDHRKPLISPQTSHKTLSKAVSQRLHVADHEDPDRNTTAAPRSPQCVLESKPPLATSGPLKPSVSDTSIRTFVSPLTSPKP

SEQ ID NO: 33411 - protein, 374 aa, Homo sapiens
  MAP TO U82672.1; EXPRESSED IN HELA, SIGNAL = 0.9; EXPRESSED IN BRAIN, SIGNAL = 0.99; SWISSPROT HIT: P52742, EVALUE 1.00e-101
GEDAQPQEMASTSFPRASGPSPEFRQHGDSDGKRGSPQNLPIEHHFACKECGDTFRLKVLLVQHQRVHSEEKGWECGDCGKVFRGVAEFNEHRKSHVAAEPQPGPSRALENAAEKREQMEREAKPFECEECGKRFKKNAGLSQHLRVHSREKPFDCEECGRSFKVNTHLFRHQKLHTSEKPFACKACSRDFLDRQELLKHQRMHTGHLPFDCDDCGKSFRGVNGLAEHQRIHSGAKPYGCPHCGKLFRRSSELTKHRRIHTGEKPYACGQCGKAFRQSSSLLEHARIHSGERPYACGECGKAFRGPSDLIKHRRIHSGLKPYECDKCGKAFRRSSGLSRHRRIHSGARRCECSQCGRVFKRRSALQKHQPTHHE

SEQ ID NO: 33412 - protein, 22 aa, Homo sapiens
  MAP TO U82672.1; EXPRESSED IN HELA, SIGNAL = 0.9; EXPRESSED IN BRAIN, SIGNAL = 0.99
GGRCPATGDGVHKLPKGQWSQS

SEQ ID NO: 33413 - protein, 250 aa, Homo sapiens
  MAP TO AL035462.17; EXPRESSED IN HELA, SIGNAL = 1.3; EXPRESSED IN BRAIN, SIGNAL = 1.3; EXPRESSED IN LUNG, SIGNAL = 1.4; EXPRESSED IN FETAL LIVER, SIGNAL = 1.1
GYGVRQSVPYGMAVVVRSPLRTSLSSLRSEHSNGTVAPDSPASPASDGPALPSPAIPRGGFALSLLANAEAAARAPKGGGLFQRGALLGKLRRAESRTSVGSQRSRVSFLKSDLSSGASDAASTASLGEAAEGADEAAPFEADIDATTTETYMGEWKNDKRSGFGVSERSSGLRYEGEWLDNLRHGYGCTTLPDGHREEGKYRHNVLVKDTKRRMLQLKSNKVRQKVEHSVEGAQRAAAIARQKAEIAAS

SEQ ID NO: 33414 - protein, 416 aa, Homo sapiens
  MAP TO AL049547.9; EXPRESSED IN HELA, SIGNAL = 1.1; EXPRESSED IN BRAIN, SIGNAL = 0.81; EXPRESSED IN FETAL LIVER, SIGNAL = 1.2; SWISSPROT HIT: P22105, EVALUE 0.00e+00
QTDVRTLCSLHGVFDLSRCTCSCEPGWGGPTCSDPTDAEIPPSSPPSASGSCPDDCNDQGRCVRGRCVCFPGYTGPSCGWPSCPGDCQGRGRCVQGVCVCRAGFSGPDCSQRSCPRGCSQRGRCEGGRCVCDPGYTGDDCGMRSCPRGCSQRGRCENGRCVCNPGYAGEDCGVRSCPRGCSQRGRCKDGRCVCDPGYTGEDCGTRSCPWDCGEGGRCVDGRCVCWPGYTGEDCSTRTCPRDCRGRGRCEDGECICDTGYSGDDCGVRSCPGDCNQRGRCEDGRCVCWPGYTGTDCGSRACPRDCRGRGRCENGVCVCNAGYSGEDCGVRSCPGDCRGRGRCESGRCMCWPGYTGRDCGTRACPGDCRGRGRCVDGRCVCNPGFTGEDCGSRRCPGDCRGHGLCEDGVCVCDAGYSG

SEQ ID NO: 33415 - protein, 340 aa, Homo sapiens
  MAP TO AL031447.4; EXPRESSED IN BRAIN, SIGNAL = 1.2; EXPRESSED IN HELA, SIGNAL = 0.98; SWISSPROT HIT: Q9UJP4, EVALUE 0.00e+00
MERPAPLAVLPFSDPAHALSLLRGLSQLRAERKFLDVTLEAAGGRDFPAHRAVLAAASPYFRAMFAGQLRESRAERVRLHGVPPDMLQLLLDFSYTGRVAVSGDNAEPLLRAADLLQFPAVKEACGAFLQQQLDLANCLDMQDFAEAFSCSGLASAAQRFILRHVGELGAEQLERLPLARLLRYLRDDGLCVPKEEAAYQLALRWVRADPPRRAAHWPQLLEAVRLPFVRRFYLLAHVEAEPLVARCPPCLRLLREARDFQAARYDRHDRGPCPRMRPRPSTGLAEILVLVGGCDQDCDELVTVDCYNPQTGQWRYLAEFPDHLGGGYSIVALGNDIYVT

SEQ ID NO: 33416 - protein, 51 aa, Homo sapiens
  MAP TO AL031447.4; EXPRESSED IN BRAIN, SIGNAL = 1.2; EXPRESSED IN HELA, SIGNAL = 0.98
RRQPLLPRHVRGAAAREPRRAGAPARSASRHAAAAAGLQLHGPRGGKRRQR

SEQ ID NO: 33417 - protein, 160 aa, Homo sapiens
  MAP TO AC006486.1; EXPRESSED IN BRAIN, SIGNAL = 0.95; EXPRESSED IN HELA, SIGNAL = 0.92
LSLLFFCIYWGQYATDGIGNESVKILGENEAGWGEGGAQGSGWASGLSLALSRPLLPSPSQAALLLQLPHLPADAYPPGEGIHGDTVPGQGVLVGRLVGEQGRGRVGGLGASSSLTAPTLLSPLMACCQGPHQPRGLREVVCLHDPVHAHPCGAAHLRGG

SEQ ID NO: 33418 - protein, 198 aa, Homo sapiens
  MAP TO AC026805.3; EXPRESSED IN BRAIN, SIGNAL = 0.8; SWISSPROT HIT: P54282, EVALUE 3.00e-05
PDGRRLERGHVRRDQVSGGRAGRHGVLHLFHCTDALWELYPSWRERRGQAWTSGRGEVAGAQGRVLRDPDTQAQVVSHQWLLFLTQTFADTLLNVFLAIAVDNLANAQELTKVEAVGECFSGKVTTCPWQIRTGVGVGVGVGVGAWEQGLELLPGMHHAKRRRLSPHSQKQTVPHQANSTAKRVGRGKAVRSLQETDG

SEQ ID NO: 33419 - protein, 25 aa, Homo sapiens
  MAP TO AC026805.3; EXPRESSED IN BRAIN, SIGNAL = 0.8; SWISSPROT HIT: O00555, EVALUE 6.00e-09
ILTGEDWNEVMYDGIKSQGGVQGGM

SEQ ID NO: 33420 - protein, 28 aa, Homo sapiens
  MAP TO AC026805.3; EXPRESSED IN BRAIN, SIGNAL = 0.8; SWISSPROT HIT: P15472, EVALUE 6.70e+00
ICRHPPECVLGHRCGQSGQRPGAHQGGG

SEQ ID NO: 33421 - protein, 130 aa, Homo sapiens
  MAP TO AL163301.2; EXPRESSED IN HELA, SIGNAL = 1.2; EXPRESSED IN BRAIN, SIGNAL = 1.7; EXPRESSED IN HEART, SIGNAL = 1.3; EXPRESSED IN LUNG, SIGNAL = 1.9; SWISSPROT HIT: P78563, EVALUE 3.00e-50
MQLNEIKPGLQYTLLSQTGPVHAPLFVMSVEVNGQVFEGSGPTKKKAKLHAAEKALRSFVQFPNASEAHLAMGRTLSVNTDFTSDQADFPDTLFNGFETPDKAEPPFYVGSNGDDSFSSSGDLSLSASPV

SEQ ID NO: 33422 - protein, 25 aa, Homo sapiens
  MAP TO AC003042.1; EXPRESSED IN HELA, SIGNAL =  19; EXPRESSED IN BRAIN, SIGNAL = 7.8
GPPGQAHEDQVPGGDVCLLPAHEGI

SEQ ID NO: 33423 - protein, 179 aa, Homo sapiens
  MAP TO AF176815.1; EXPRESSED IN PLACENTA, SIGNAL = 1.8; EXPRESSED IN HELA, SIGNAL = 0.38; EXPRESSED IN BRAIN, SIGNAL = 1.5; EXPRESSED IN LUNG, SIGNAL = 1.4; SWISSPROT HIT: P51403, EVALUE 2.20e+00
MGELEKPCGVSRVLSESRSTVFRASAGGRGSVAKVQLSSAAAPRLPCADAVAAAAAAAAATAFAATVSAAAVLALPLGASIVPAAPGPETGHLGGSRNGRRPTELRPQGAGGTRSGRGQLRNPGEPGPKRGAAGGRGGEVYGLRSWGSPFPARLSPPTSPSGVGAPAGAPGDEPGLEVA

SEQ ID NO: 33424 - protein, 59 aa, Homo sapiens
  MAP TO AL078614.2; EXPRESSED IN BRAIN, SIGNAL = 1.1; SWISSPROT HIT: Q99439, EVALUE 1.00e-23
MKASQCVIRLQITNKCASQSGMTAYGTRRHLYDPKNRILPPMDNSTISLQMGTNKYASQ

SEQ ID NO: 33425 - protein, 188 aa, Homo sapiens
  MAP TO AC005736.1; EXPRESSED IN BRAIN, SIGNAL = 0.93; SWISSPROT HIT: P51830, EVALUE 1.00e-101
MQQIEEVSILFADIVGFTKMSANKSAHALVGLLNDLFGRFDRLCEETKCEKISTLGDCYYCVAGCPEPRADHAYCCIEMGLGMIKAIEQFCQEKKEMVNMRVGVHTGTVLCGILGMRRFKFDVWSNDVNLANLMEQLGVAGKVHISEATAKYLDDRYEMEDGKVIERLGQSVVADQLKGMCTALPRHP

SEQ ID NO: 33426 - protein, 1123 aa, Homo sapiens
  MAP TO AL049781.4; EXPRESSED IN BRAIN, SIGNAL = 1.5; EXPRESSED IN HELA, SIGNAL = 0.87; SWISSPROT HIT: Q13023, EVALUE 0.00e+00
ETLNVIDPGLMDLNGMSEDALEWDEMDISNKLISLNEESNDLDQELQPVIPSLKLGETSNEDPGYDEEADNHGGSQYASNITAPSSPHIYQVYSLHNVELYEDNHMPFLKNNPKVTGMTQPNVLTKSLSKDSSFSSTKSLPDLLGGSNLVKPCACHGGDMSQNSGSESGIVSEGDTETTTNSEMCLLNAVDGSPSNLETEHLDPQMGDAVNVLKQKFTDEGESIKLPNSSQSSISPVGCVNGKVGDLNSITKHTPDCLGEELQGKHDVFTFYDYSYLQGSKLKLPMIMKQSQSEKAHVEDPLLRGFYFDKKSCKSKHQTTELQPDVPPHERILASASHEMDRISYKSGNIEKTFTGMQNAKQLSLLSHSSSIESLSPGGDLFGLGIFKNGSDSLQRSTSLESWLTSYKSNEDLFSCHSSGDISVSSGSVGELSKRTLDLLNRLENIQSPSEQKIKRSVSDITLQSSSQKMSFTGQMSLDIASSINEDSAASLTELSSSDELSLCSEDIVLHKNKIPESNASFRKRLTRSVADESDVNVSMIVNVSCTSACTDDEDDSDLLSSSTLTLTEEELCIKDEDDDSSIATDDEIYEDCTLMSGLDYIKNELQTWIRPKLSLTRDKKRCNVSDEMKGSKDISSSEMTNPSDTLNIETLLNGSVKRVSENNGNGKNSSHTHELGTKRENKKTIFKVNKDPYVADMENGNIEGIPERQKGKPNVTSKVSENLGSHGKEISESEHCKCKALMDSLDDSNTAGKEFVSQDVRHLPKKCPNHHHFENQSTASTPTEKSFSELALETRFNNRQDSDALKSSDDAPSMAGKSAGCCLALEQNGTEENASISNISCCNCEPDVFHQKDAEDCSVHNFVKEIIDMASTALKSKSQPENEVAAPTSLTQIKEKVLEHSHRPIQLRKGDFYSYLSLSSHDSDCGEVTNYIEEKSSTPLPLDTTDSGLDDKEDIECFFEACVEGDSDGEEPCFSSAPPNESAVPSEAAMPLQATACSSEFSDSSLSADDADTVALSSPSSQERAEVGKEVNGLPQTSSGCAENLEFTPSKLDSEKESSGKPGESGMPEEHNAASAKSKVQDLSLKANQPTDKAALHPSPKTLTCEENLLNLHEKRHRNMHR

SEQ ID NO: 33427 - protein, 189 aa, Homo sapiens
  MAP TO AC006342.1; EXPRESSED IN HELA, SIGNAL = 1.3; EXPRESSED IN BRAIN, SIGNAL = 2.8; EXPRESSED IN HEART, SIGNAL = 3.9; EXPRESSED IN FETAL LIVER, SIGNAL = 2.5; SWISSPROT HIT: P49757, EVALUE 1.00e-92
TEWGQSSGAASPGLFQAGHRRTPSEADRWLEEVSKSVRAQQPQASAAPLQPVLQPPPPTAISQPASPFQGNAFLTSQPVPVGVVPALQPAFVPAQSYPVANGMPYPAPNVPVVGITPSQMVANVFGTAGHPQAAHPHQSPSLVRQQTFPHYEASSATTSPFFKPPAQHLNGSAAFNGVDDGRLASADRH

SEQ ID NO: 33428 - protein, 22 aa, Homo sapiens
  MAP TO AC006342.1; EXPRESSED IN HELA, SIGNAL = 1.3; EXPRESSED IN BRAIN, SIGNAL = 2.8; EXPRESSED IN HEART, SIGNAL = 3.9; EXPRESSED IN FETAL LIVER, SIGNAL = 2.5
VLPLQVSSRPVIDVLPLRPTDG

SEQ ID NO: 33429 - protein, 256 aa, Homo sapiens
  MAP TO AL031667.17; EXPRESSED IN BRAIN, SIGNAL = 1.3; EXPRESSED IN HELA, SIGNAL = 1.3; EXPRESSED IN LUNG, SIGNAL = 1.1; SWISSPROT HIT: O02696, EVALUE 1.00e+01
PPDTTIYVEPITEERAARTLYRIELLRKVREQVLKCPQLHERLQLCRPSLYLPVWWECGKHDRDLLIGTAKHGLNRTDCYIMNDPQLSFLDAYRNYAQHKRSGTQAPGNLCCLYQTNSKLYESLTYSQMSRTSESLENEPENLVRVESRDDHLSLPDVTCENFISKVQDVISINHDESLLPESLESMMYGKKVLSQEPSSFQESPSTNTESRKDVITISISKDGNCQSGGPEAEIASGPTFMGSLEAGGVAQANIK

SEQ ID NO: 33430 - protein, 173 aa, Homo sapiens [sequence omitted]

SEQ ID NO: 33431 - protein, 168 aa, Homo sapiens
  MAP TO AC005895.1; EXPRESSED IN BRAIN, SIGNAL = 0.78; SWISSPROT HIT: P47902, EVALUE 8.00e-16
MYVGYVLDKDSPVYPGPARPASLGLGPQAYGPPAPPPAPPQYPDFSSYSHVEPAPAPPTAWGAPFPAPKDDWAAAYGPGPAAPAASPASLAFGPPPDFSPVPAPPGPGPGLLAQPLGGPGTPSSPGAQRPTPYEWMRRSVAAGGGGGSGKDPSLALRLWTCRCSGAAQ

SEQ ID NO: 33432 - protein, 161 aa, Homo sapiens
  MAP TO AC005895.1; EXPRESSED IN BRAIN, SIGNAL = 0.78
TRIRPCTPAQPGQPASAWARKPTAPRPRPRRPRSTPTSPATLTWSRPPRPRRPGGRPSLRPRTTGPPPTARAPRPLPPAQLRWHSGPLQTLARCRRPLGPARASWRSPSGARAHRPRPERRGRRPTSGCGAAWRPEAAVAAVRTLPSPCASGPAGARARPR

SEQ ID NO: 33433 - protein, 187 aa, Homo sapiens
  MAP TO AL121716.2; EXPRESSED IN HELA, SIGNAL = 0.81; EXPRESSED IN BRAIN, SIGNAL = 0.81; SWISSPROT HIT: Q9UIY3, EVALUE 1.00e-111
VKIDLQVTMPHSYPYVALQLFGRSSELDRHQQLLLNKGLTSYIGTFDPGELCVCAAIQWLQDNSASYFLNRKLVYEPSTQAKPVKNTFLRMWIYSHHIYQQDLRKKILDVGKRLDVTGFCMTGKPGIICVEGFKEHCEEFWHTIRYPNWKHISCKHAESVETEGNGEDLRLFHSFEELLLEAHGDYG

SEQ ID NO: 33434 - protein, 309 aa, Homo sapiens
  MAP TO AC022882.3; EXPRESSED IN BRAIN, SIGNAL = 0.86; EXPRESSED IN HELA, SIGNAL = 0.94; SWISSPROT HIT: Q95155, EVALUE 1.00e-82
FNMKNVTEVTLFVLKGFTDNLELQTIFFFLFLAIYLFTLMGNLGLILVVIRDSQLHKPMYYFLSMLSSVDACYSSVITPNMLVDFTTKNKVISFLGCVAQVFLACSFGTTECFLLAAMAYDRYVAIYNPLLYSVSMSPRVYMPLINASYVAGILHATIHTVATFSLSFCGANEIRRVFCDIPPLLAISYSDTHTNQLLLFYFVGSIELVTILIVLISYGLILLAILKMYSAEGRRKVFSTCGAHLTGVSIYYGTILFMYVRPSSSYASDHDMIVSIFYTIVIPLLNPVIYSLRNKDVKDSMKKMFGKNQ

SEQ ID NO: 33435 - protein, 172 aa, Homo sapiens
  MAP TO AP000538.1; EXPRESSED IN FETAL LIVER, SIGNAL =   1; EXPRESSED IN HELA, SIGNAL = 0.49; EXPRESSED IN BRAIN, SIGNAL = 0.85; SWISSPROT HIT: P18175, EVALUE 1.00e-04
EKQTEPSSSALQSFVREKHSDPSSSVLESYVREKHSDPRSSVLESYMRDKHSEPSSSILKSFGREKHSHHRNSVLESYVREKYSDYRSVVLKSSIRNKHSEPSSSVLEPFVMDKHSDPRSSVLESYVRDKHSEPSSTVLECYVRDKHSERSSSVPESYVSNKLSELRSSVLE

SEQ ID NO: 33436 - protein, 162 aa, Homo sapiens
  MAP TO AC006249.1; EXPRESSED IN BRAIN, SIGNAL = 1.8; EXPRESSED IN HELA, SIGNAL =   3; EXPRESSED IN HEART, SIGNAL = 2.6; SWISSPROT HIT: P10569, EVALUE 8.00e-05
APPRQEAPAPVRAQVPSPLHAAGSQPGGSPTFRRLQPEDAPRLLPTSQPRPGGHFTQPRPGPSSWAGAVPWSQVGLRLPWGPSKVAGKGRAHPRRGAGKSTEGPPACRPRGKGRGALLPAGSPEKCGRSSEVPAPGVETGGVDYPAPWSSRVRAWRAPARRG

SEQ ID NO: 33437 - protein, 210 aa, Homo sapiens
  MAP TO AP000556.2; EXPRESSED IN HELA, SIGNAL = 0.9; EXPRESSED IN BRAIN, SIGNAL = 0.97; SWISSPROT HIT: Q9M291, EVALUE 5.20e-02
PDSVSRKDPGSQPHSPDARGPPSARPAPTPSLQYRSPNWRHPGTLLTQSHATRGGPICSLAPSWGYQSSQRDAFRTSPRLPLCGRPQSPPPCGAPGGTGIFLWFFLTGARCAPHSAGPSGASSAGLEAATRALTVPSVRSRVGPRGVARGTARGSRRAGGDGGGGGSSARRASSSARSSARSASISAPSSSRTAASPSCSRRSLTSRTPA

SEQ ID NO: 33438 - protein, 236 aa, Homo sapiens
  MAP TO AL157689.1; EXPRESSED IN BRAIN, SIGNAL = 1.1; EXPRESSED IN HELA, SIGNAL = 0.93; SWISSPROT HIT: O64963, EVALUE 1.80e+00
AAVGVAVAGGCTWPFPTRSSPRPAPTAAARKTQFGASATAALAPVASDPLSPPLSASPRDKHPGNGGGGGGGGGGAGGGGPSASNSLLYTGDLEALQRLQAGNVVLPLVHRVTGTLAATSTAAQRVYTTGTIRYAPAEVTLAMQSNLLPNAHAVNFVDVNSPGFGLDPKTPMEMLYHHVHRLNMSGPFGGAVSAASLTQMPAGNVFTTAEGLFSTLPFPVYSNGIHAAQTLERKED

SEQ ID NO: 33439 - protein, 112 aa, Homo sapiens
  MAP TO AL157689.1; EXPRESSED IN BRAIN, SIGNAL = 1.1; EXPRESSED IN HELA, SIGNAL = 0.93; SWISSPROT HIT: Q91987, EVALUE 5.70e+00
RRRWGWRWRGAARGHSRLGPHPARRRRRPPARLSSAPRPPRPWPPSPPTRCHPRSRRPRGTSTPGTAAGAGAGAAARGAAAPARPTPCCTLGTWRRCRGCRRATSCSRWCTG

SEQ ID NO: 33440 - protein, 286 aa, Homo sapiens
  MAP TO AL163303.2; EXPRESSED IN BRAIN, SIGNAL = 0.84; EXPRESSED IN HELA, SIGNAL = 0.91; SWISSPROT HIT: P31626, EVALUE 6.30e-01
CENGLIPKIGTKKWGIAIKIHENVEAALRKQLWNWVTGRNWKSVKGSKEDRKMWQNSELPRDLLNFCDQNADSDTDSEVQAEKVSDGDEELAGNWSKGHFCYALTKKLAALCPCPRDLWNFELEGDDFGYLVEEISKQQSIQDVAWVLLTVYAQMCEQRNDLKLEFIFKREAEHKSLENLQPGPVVGKKSLFSGLECKQAAEICISKEKPSTNIQDSGEKVSKAFQRPLQQPLPSQAWRPRWEEWFHGPSPRPQHHGTLLPASLPFQLQLWLKGAQLQLRLLLQRM

SEQ ID NO: 33441 - protein, 507 aa, Homo sapiens
  MAP TO AC035150.1; EXPRESSED IN HELA, SIGNAL = 0.42; EXPRESSED IN BRAIN, SIGNAL = 0.97; SWISSPROT HIT: Q9UK13, EVALUE 0.00e+00
GKIQIEMETVPEAGPHEEWSCQQIWEQIASDLTRSQNSIRNSSQFFKEGDVPCQIEARLSISHVQQKPYRCNECKQSISDVSVFDLHQQSHSGEKSHTCGECGKSFCYSPALHIHQRVHMGEKCYKCDVCGKEFNQSSHLQTHQRVHTGEKPFKRGQCGKGFHSRSALNVHCKLHTGEKPYNCEECGKAFIHDSQLQEHQRIHTGEKPFKCDICGKSFRVRSRLNRHSMVHTGEKPFRCDTCGKNFRQRSALNSHSMVHIEEKPYKCEQCGKGFICRRDFCKHQMVHTGEKPYNCKECGKTFRWSSCLLNHQQVHSGQKSFKCEECGKGFYTNSRRSSHQRSHNGEKPYNCEECGKDYKRRLDLEFHQRVHTGERPYNCKECGKSFGWASCLLKHQRLHSGEKPFKCEECGKRFTQSTQLHSHQTCHTGEKLYKCEQCEKGYNSKFNLDMHQRVHRGERPYNCKECGKSFGWASCLLKHQRLHSGEKPLKSGVWEEIYSEFTASFTS

SEQ ID NO: 33442 - protein, 32 aa, Homo sapiens
  MAP TO AC035150.1; EXPRESSED IN HELA, SIGNAL = 0.42; EXPRESSED IN BRAIN, SIGNAL = 0.97
EARSKLRWRLFQKQDHMKSGPVSKYGNKLQVT

SEQ ID NO: 33443 - protein, 111 aa, Homo sapiens
  MAP TO AF170801.1; EXPRESSED IN BRAIN, SIGNAL = 1.8; EXPRESSED IN HELA, SIGNAL = 0.5; SWISSPROT HIT: P40602, EVALUE 4.80e-01
GPCARRARSCGCWPWTVTSTPWAASACSAWSATTRAPTAGPPWRRCPGAPSPWRMRPPPATARSTCPGAPSSIACSSMTRGATSGRSARAAAAASARPTWWLSTASSTASI

SEQ ID NO: 33444 - protein, 333 aa, Homo sapiens [sequence omitted]

SEQ ID NO: 33445 - protein, 25 aa, Homo sapiens
  MAP TO AL122010.2; EXPRESSED IN BRAIN, SIGNAL = 0.91
WVTGASWRSCWTRSRSTRPWWVRSG

SEQ ID NO: 33446 - protein, 130 aa, Homo sapiens
  MAP TO AP000346.1; EXPRESSED IN BRAIN, SIGNAL = 0.8; EXPRESSED IN HELA, SIGNAL = 1.4; SWISSPROT HIT: Q9QY06, EVALUE 4.70e+00
LTCEGRHRLPGGLSKCEVWRQCLAHRTHSVTTGCQDRHQCFSCSRLPHGVEVPDPLLHPPAGRRQRVQDELPERSSLYSFHISERIRPLLMTSWAPAQQERALRVDRPHPLPCWLACRVQEGFCRATWWV

SEQ ID NO: 33447 - protein, 64 aa, Homo sapiens
  MAP TO AC007900.1; EXPRESSED IN PLACENTA, SIGNAL = 1.5; EXPRESSED IN BRAIN, SIGNAL =   1; EXPRESSED IN HELA, SIGNAL = 1.3; EXPRESSED IN LUNG, SIGNAL =   1
TRKPGFMVISMFFQLHYATYLMIINTRGLKTVPVYMFCFIFLITSFFFHTFFLIFLLLHVFLNK

SEQ ID NO: 33448 - protein, 40 aa, Homo sapiens
  MAP TO AL008723.8; EXPRESSED IN BRAIN, SIGNAL = 1.3; EXPRESSED IN HELA, SIGNAL = 1.6
GIFGASDNQIIDLNLFNLQLFIECLLSARHCFGANKTSVK

SEQ ID NO: 33449 - protein, 28 aa, Homo sapiens
  MAP TO AL049649.4; EXPRESSED IN PLACENTA, SIGNAL = 1.8; EXPRESSED IN BRAIN, SIGNAL = 1.3; EXPRESSED IN HEART, SIGNAL = 1.3; EXPRESSED IN LUNG, SIGNAL = 1.2; EXPRESSED IN FETAL LIVER, SIGNAL = 1.5; EXPRESSED IN HELA, SIGNAL = 2.5
FHIESGAIMLNREDYYLVSICYVLNLCF

SEQ ID NO: 33450 - protein, 167 aa, Homo sapiens
  MAP TO AC007567.1; EXPRESSED IN BRAIN, SIGNAL = 0.85; EXPRESSED IN HELA, SIGNAL = 1.1; SWISSPROT HIT: P31792, EVALUE 5.00e-25
ETQKANTHLVRWTPEAEAAFQALKKALTQAPVLISLPTGQDFPLYVTEKTEIALGVLTQVQGTSLQPMAYLSKETDVVAKGWPHCLQVVAAVAVLVSEAVKVIQERDLTVWTSHDVNGILTAKGDLWLSDNRLLKYQALLLEGPVLRLCTCATLNPATFLPGNEEKI

SEQ ID NO: 33451 - protein, 42 aa, Homo sapiens
  MAP TO AC007462.2; EXPRESSED IN BRAIN, SIGNAL = 1.1; EXPRESSED IN HELA, SIGNAL =   1; EXPRESSED IN LUNG, SIGNAL = 1.1
LFWELIEMRYHVQIFITVHEIRRTLRNGYNNFYLVLLSLLFW

SEQ ID NO: 33452 - protein, 133 aa, Homo sapiens
  MAP TO AL031588.1; EXPRESSED IN BRAIN, SIGNAL = 0.79; EXPRESSED IN HELA, SIGNAL = 0.6; EXPRESSED IN HEART, SIGNAL = 1.3; EXPRESSED IN LUNG, SIGNAL = 0.92
TMKGHRPQGAAVPRWEILTRLLTASHICFMRDLPAALGLLALHLTASLHSSLTGPQRATLPGVHVRHYLPCMSLPPQLARRLCSRLWAGSAGFRRCPGQVDTSHPCFPRAPLNILLARLCPRPCQELLEQGGV

SEQ ID NO: 33453 - protein, 49 aa, Homo sapiens
  MAP TO AL079300.11; EXPRESSED IN LUNG, SIGNAL = 0.96; EXPRESSED IN FETAL LIVER, SIGNAL = 0.94; EXPRESSED IN HELA, SIGNAL = 0.58; EXPRESSED IN BRAIN, SIGNAL = 0.95
VIRAKQGNYTLLGLLFQSAYIIQSMITCGHTHTYTHTHTHTHTPPKKPR

SEQ ID NO: 33454 - protein, 33 aa, Homo sapiens
  MAP TO AP000123.1; EXPRESSED IN PLACENTA, SIGNAL = 1.6; EXPRESSED IN BRAIN, SIGNAL = 1.3; EXPRESSED IN HELA, SIGNAL = 2.3; EXPRESSED IN LUNG, SIGNAL = 1.4; EXPRESSED IN HEART, SIGNAL = 1.6
CSRNPLHLNCNISSFLGLQPVNPPWRFWTCQSL

SEQ ID NO: 33455 - protein, 79 aa, Homo sapiens
  MAP TO AP000344.1; EXPRESSED IN BRAIN, SIGNAL = 0.8; EXPRESSED IN HELA, SIGNAL = 0.54; SWISSPROT HIT: P23463, EVALUE 1.40e-01
LNGQDASWRLEEVPDLAAFPPSHPHYHTNPMPACLCQGRSPAGQLWQPPVALPCQQSFCATAVCPHSKAHIPPGHSPVK

SEQ ID NO: 33456 - protein, 191 aa, Homo sapiens
  MAP TO AP000344.1; EXPRESSED IN BRAIN, SIGNAL = 0.78; EXPRESSED IN HELA, SIGNAL = 0.31; SWISSPROT HIT: P23792, EVALUE 1.90e+00
RHSSLLVNLRKPDTQVLEGRPPASRQHLGLQGCSLEWGQSRLPLVSGCRAAVWSGGSTGSHSSRAAGLRSGVGAVPAPTRLGLQGCGLEWGQYQLPLLSCHACLQHTSPHTSDEATACQLLAFFLPGCPAMSASALHFKKCLERSCLQKTSLLFSVPRGASPAEAAGYLALATGGCLLAARGRRQPSGTSP

SEQ ID NO: 33457 - protein, 71 aa, Homo sapiens
  MAP TO Z82188.2; EXPRESSED IN BRAIN, SIGNAL = 0.84; EXPRESSED IN HELA, SIGNAL = 0.47; SWISSPROT HIT: P29350, EVALUE 3.90e+00
LRASSSQVQVQGFILPSSSSGPHPSKFKFSQKEQMSIPGKVLTKIYCDWTSLGPGPPFNQSYLSEWCSAVL

SEQ ID NO: 33458 - protein, 26 aa, Homo sapiens
  MAP TO AL008715.1; EXPRESSED IN HELA, SIGNAL = 1.1; EXPRESSED IN BRAIN, SIGNAL = 0.98; EXPRESSED IN HEART, SIGNAL = 1.3
IPGGRVRWAERTSQGHGWLGDLCAMW

SEQ ID NO: 33459 - protein, 27 aa, Homo sapiens
  MAP TO AC004909.2; EXPRESSED IN HELA, SIGNAL = 1.1; EXPRESSED IN BRAIN, SIGNAL = 0.78
KSSNGFPSYSERCKVIKMNYKILSSIY

SEQ ID NO: 33460 - protein, 157 aa, Homo sapiens
  MAP TO AC002400.1; EXPRESSED IN FETAL LIVER, SIGNAL =   2; EXPRESSED IN HELA, SIGNAL = 0.58; SWISSPROT HIT: O51345, EVALUE 3.00e-36
YDNRCRNMSQEQVAQKLAKDPKPAIRFRLEQVVPAFQDLVYGWNRHEVASVEGDPVIMKSDGFPTYHLACVVDDHHMGISHVLRGSEWLVSTAKHLLLYQALGWQPPHFAHLPLLLNRDGSKLSKRQGDVFLEHFAADGFLPDSLLDIITNCGSGFA

SEQ ID NO: 33461 - protein, 69 aa, Homo sapiens
  MAP TO AC004493.1; EXPRESSED IN FETAL LIVER, SIGNAL =   5; EXPRESSED IN PLACENTA, SIGNAL = 5.3
GAVGVRGSARFTAEGATAVLGLAKFMAAAAAGVRESARFTAVGMAGVLALARFMAAAEAAGILLARLAA

SEQ ID NO: 33462 - protein, 57 aa, Homo sapiens
  MAP TO AC004792.1; EXPRESSED IN PLACENTA, SIGNAL = 5.1; EXPRESSED IN HEART, SIGNAL = 1.7; EXPRESSED IN FETAL LIVER, SIGNAL = 5.5; SWISSPROT HIT: O14901, EVALUE 1.90e-01
ALAMTKKGQDTAWPMASESTSPKPWQLPRSVEPAGAQKSRIEVWEPPPRFQRMYGNT

SEQ ID NO: 33463 - protein, 60 aa, Homo sapiens
  MAP TO AC011904.3; EXPRESSED IN LUNG, SIGNAL = 1.3; EXPRESSED IN FETAL LIVER, SIGNAL = 1.1; EXPRESSED IN PLACENTA, SIGNAL = 1.4; SWISSPROT HIT: P12577, EVALUE 5.50e-01
PRCSTNPEYEKYEEKYAKAHHNLLETSVKKKILNATRGEDSYLQWNKDEVDITLLIGNNA

SEQ ID NO: 33464 - protein, 33 aa, Homo sapiens
  MAP TO AC011904.3; EXPRESSED IN LUNG, SIGNAL = 1.3; EXPRESSED IN FETAL LIVER, SIGNAL = 1.1; EXPRESSED IN PLACENTA, SIGNAL = 1.4; SWISSPROT HIT: Q9ZCP8, EVALUE 5.00e+00
IQDAQQTLSMRNMKKNMPRLIITCWKPVLKRKS

SEQ ID NO: 33465 - protein, 148 aa, Homo sapiens
  MAP TO AF274858.1; EXPRESSED IN FETAL LIVER, SIGNAL =   7; EXPRESSED IN LUNG, SIGNAL = 4.9
PRQQEEMRPLDVAELSEPEEVEVLELEGGFEQFLLPVIHEMPEDIASLTSTGGRTCGSGARCGRWTICSSRSKPRWRLRRSILNRLHNPGDAVEGRVTKRCQKAEEKAKEMVKMAEMLVELAQRIETNESRARSVVYSQWILVNWWRL

SEQ ID NO: 33466 - protein, 34 aa, Homo sapiens
  MAP TO AC008886.4; EXPRESSED IN LUNG, SIGNAL = 0.54; EXPRESSED IN HELA, SIGNAL = 0.62; EXPRESSED IN HEART, SIGNAL = 1.3; EXPRESSED IN FETAL LIVER, SIGNAL = 0.6
HSSSSSSSLGCCHSHRGTVEERPSAMYGLVSLLS

SEQ ID NO: 33467 - protein, 32 aa, Homo sapiens
  MAP TO AC004517.1; EXPRESSED IN HELA, SIGNAL = 2.2; EXPRESSED IN FETAL LIVER, SIGNAL = 3.5
LEATTNSKSPDVELDATLGPCGLGRPVARHPT

SEQ ID NO: 33468 - protein, 32 aa, Homo sapiens
  MAP TO AC004517.1; EXPRESSED IN HELA, SIGNAL = 2.2; EXPRESSED IN FETAL LIVER, SIGNAL = 3.5
WKPRPIRKVQMWSWTQPLDRAVWGGQWPVIQQ

SEQ ID NO: 33469 - protein, 62 aa, Homo sapiens
  MAP TO AC004530.1; EXPRESSED IN FETAL LIVER, SIGNAL =   4
AQGHHQEQAPNHRHGLEEVVFQEVMHGLVDWNGPEGVEIYVDGKEPHNKSQSSQLGFKTNGH

SEQ ID NO: 33470 - protein, 70 aa, Homo sapiens
  MAP TO AF241734.1; EXPRESSED IN FETAL LIVER, SIGNAL = 1.3; EXPRESSED IN PLACENTA, SIGNAL = 1.7; EXPRESSED IN HEART, SIGNAL = 2.3
HSLKEDGASFMFPSSGTFSSDESRVPLPPFCSLGMWEGVESHLLLSTQPKLAMTKPWKGVWKLLQIHQST

SEQ ID NO: 33471 - protein, 34 aa, Homo sapiens
  MAP TO AC016027.15; EXPRESSED IN FETAL LIVER, SIGNAL = 0.43
LPLPPCTSSTSWPSSSAGSGRLHFLASTSSASVT

SEQ ID NO: 33472 - protein, 33 aa, Homo sapiens
  MAP TO AC016027.15; EXPRESSED IN FETAL LIVER, SIGNAL = 0.43
SPSSLHFLYKLAQLFRWIRKAAFSRLYQLRIRD

SEQ ID NO: 33473 - protein, 38 aa, Homo sapiens
  MAP TO AC000034.2; EXPRESSED IN HELA, SIGNAL = 0.78; EXPRESSED IN FETAL LIVER, SIGNAL = 1.6
AVQEAERHQLLGSPQGTSNCGRRKRGSGLVLRGWSRRR

SEQ ID NO: 33474 - protein, 38 aa, Homo sapiens
  MAP TO AC000034.2; EXPRESSED IN HELA, SIGNAL = 0.78; EXPRESSED IN FETAL LIVER, SIGNAL = 1.6
CTGSRAASASGEPSGNFQLWQKEKGKRACLTWLEQEEG

SEQ ID NO: 33475 - protein, 138 aa, Homo sapiens
  MAP TO AL121886.22; EXPRESSED IN LUNG, SIGNAL = 1.5; EXPRESSED IN FETAL LIVER, SIGNAL = 3.2; SWISSPROT HIT: P10244, EVALUE 1.00e-74
DPDAWCDLSKFDLPEEPSAEDSINNSLVQLQASHQQQVLPPRQPSALVPSVTEYRLDGHTISDLSRSSRGELIPISPSTEVGGSGIGTPPSVLKRQRKRRVALSPVTENSTSLSFLDSCNSLTPKSTPVKTLPFSPSQ

SEQ ID NO: 33476 - protein, 33 aa, Homo sapiens
  MAP TO AF176815.1; EXPRESSED IN FETAL LIVER, SIGNAL = 2.4; EXPRESSED IN PLACENTA, SIGNAL = 1.7; EXPRESSED IN HEART, SIGNAL = 1.9
LRSSSTALCTEETRARLAGPHQTSWRPCASTSS

SEQ ID NO: 33477 - protein, 82 aa, Homo sapiens
  MAP TO AF176815.1; EXPRESSED IN FETAL LIVER, SIGNAL = 2.4; EXPRESSED IN PLACENTA, SIGNAL = 1.7; EXPRESSED IN HEART, SIGNAL = 1.9; SWISSPROT HIT: O15527, EVALUE 3.00e-45
WREQSPAHWSGVLADQVWTLTQTEEQLHCTVYRGDKSQASRPTPDELEAVRKYFQLDVTLAQLYHHWGSVDSHFQEVAQKFQ

SEQ ID NO: 33478 - protein, 90 aa, Homo sapiens
  MAP TO AL109981.1; EXPRESSED IN FETAL LIVER, SIGNAL = 0.95; EXPRESSED IN PLACENTA, SIGNAL = 0.85; EXPRESSED IN HEART, SIGNAL = 7.2; SWISSPROT HIT: P81274, EVALUE 4.00e-05
SLEPTYQQLQKMKLDKSPFVVVSVVGQELLTAGHHGASVVVLEAALKIGTCSLKLRGSVFSALSSAYWSLGNTEKSTGYMQQDLDVAKTL

SEQ ID NO: 33479 - protein, 51 aa, Homo sapiens
  MAP TO AL121902.13; EXPRESSED IN FETAL LIVER, SIGNAL = 0.7; EXPRESSED IN HELA, SIGNAL = 0.68
MKYLTITADNSQGNQKQEKSEKQSQPGGAYGDMMTQCNVGTRMGAWNRKKI

SEQ ID NO: 33480 - protein, 133 aa, Homo sapiens
  MAP TO AC026722.3; EXPRESSED IN PLACENTA, SIGNAL = 1.1; EXPRESSED IN LUNG, SIGNAL = 1.1; EXPRESSED IN FETAL LIVER, SIGNAL = 1.5; SWISSPROT HIT: P26810, EVALUE 8.00e-10
KTDGSWKMTADYRKLNQVVTPVAVAVDVVSFFEQINTSPGTWYVAIDLANALFSILNHKAHQKQFVFSWKGQQYSFTVLPHGYINSPALCHNLIWRHLDHFSLPQDITLVHYIDDILLIGSSEQQVANTLDLV

SEQ ID NO: 33481 - protein, 23 aa, Homo sapiens
  MAP TO AF235093.1; EXPRESSED IN HELA, SIGNAL = 0.8; EXPRESSED IN PLACENTA, SIGNAL = 1.8; EXPRESSED IN FETAL LIVER, SIGNAL = 1.4
DDHDSEYYDDDKEYDSDDEDGFC

SEQ ID NO: 33482 - protein, 79 aa, Homo sapiens
  MAP TO AC008857.4; EXPRESSED IN FETAL LIVER, SIGNAL = 1.4; EXPRESSED IN LUNG, SIGNAL = 1.4; EXPRESSED IN HEART, SIGNAL = 1.8; SWISSPROT HIT: P10637, EVALUE 1.80e+00
MFSSPQSLLSWEILTGSPKINSNRYPLEGNLPFFSLLPPELRAFYILAPTAGPLERGPQLSPLLAQHSARCLAELAYMN

SEQ ID NO: 33483 - protein, 23 aa, Homo sapiens
  MAP TO AC008857.4; EXPRESSED IN FETAL LIVER, SIGNAL = 1.4; EXPRESSED IN LUNG, SIGNAL = 1.4; EXPRESSED IN HEART, SIGNAL = 1.8
NVLQSPVPVKLGNSYWFTKNQLK

SEQ ID NO: 33484 - protein, 136 aa, Homo sapiens
  MAP TO AC003966.1; EXPRESSED IN FETAL LIVER, SIGNAL = 0.4; EXPRESSED IN PLACENTA, SIGNAL = 0.43; SWISSPROT HIT: O14978, EVALUE 2.00e-27
MMMVDLKVAAYLDPQIRALWETKGPARESSGQSKKSPQMDCLDPKSSCWHFRNFTYDEAGGPREAVSKLQELCHLWLKPEIHSKEQILELLVLEQFLTILPRETQTQMQKHHPQSIEEAVALVEHLQRESGQTWNG

SEQ ID NO: 33485 - protein, 32 aa, Homo sapiens
  MAP TO AC003966.1; EXPRESSED IN FETAL LIVER, SIGNAL = 0.4; EXPRESSED IN PLACENTA, SIGNAL = 0.43
DDGRSESGCVLGPSDQGFVGDQGACKRELRSE

SEQ ID NO: 33486 - protein, 38 aa, Homo sapiens
  MAP TO AC008408.5; EXPRESSED IN FETAL LIVER, SIGNAL = 3.7; EXPRESSED IN HELA, SIGNAL = 2.2; EXPRESSED IN HEART, SIGNAL = 2.3
NCCVMRYTTAGQLWNIISPREFVDFSYTVGYKEGLLSC

SEQ ID NO: 33487 - protein, 46 aa, Homo sapiens
  MAP TO AC002398.1; EXPRESSED IN FETAL LIVER, SIGNAL = 0.38; SWISSPROT HIT: P07910, EVALUE 2.80e+00
GRSWPVLRSYDDFRSLDAHLHRCIFDRRFSCLPELPPPPEGARAAQ

SEQ ID NO: 33488 - protein, 42 aa, Homo sapiens
  MAP TO AB015355.1; EXPRESSED IN FETAL LIVER, SIGNAL =  11; EXPRESSED IN LUNG, SIGNAL = 0.71; SWISSPROT HIT: P49281, EVALUE 3.00e-19
YSCFSFRKLWAFTGPGFLMSIAYLDPGNIESDLQSGAVAGFK

SEQ ID NO: 33489 - protein, 129 aa, Homo sapiens
  MAP TO AL109754.13; EXPRESSED IN PLACENTA, SIGNAL = 0.42; EXPRESSED IN FETAL LIVER, SIGNAL = 0.44; SWISSPROT HIT: Q99728, EVALUE 1.00e-05
LVLVQKAFSRSWSSMALADKRLENLQIYKVLQCVRNKDKKQIEKLTKLGYPELINYTEPINGLSALHLASVSNDIDMVSFLLDLGAHPDVQDRMGCTPTMRAAELGHELSMEILAKAKADMTIVDNEGK

SEQ ID NO: 33490 - protein, 52 aa, Homo sapiens
  MAP TO AC008050.4; EXPRESSED IN HEART, SIGNAL = 1.2; EXPRESSED IN LUNG, SIGNAL = 0.57; EXPRESSED IN FETAL LIVER, SIGNAL = 0.49; EXPRESSED IN PLACENTA, SIGNAL = 0.92; SWISSPROT HIT: P38994, EVALUE 8.10e+00
FYTFGMFVDHGDGDCSQHNVYFSSTVKEGNRQSPEVASHGSSRPAKKSAGHQ

SEQ ID NO: 33491 - protein, 93 aa, Homo sapiens
  MAP TO AL109797.18; EXPRESSED IN FETAL LIVER, SIGNAL = 0.96; EXPRESSED IN LUNG, SIGNAL = 0.73; EXPRESSED IN PLACENTA, SIGNAL = 1.2; SWISSPROT HIT: Q93008, EVALUE 2.00e-38
VVYALLMPAGAPLADDSSDFQFHFLKSGGLPLVLSMLTRNNFLPNADMETRRGAYLNALKIAKLLLTAIGYGHVRAVAEACQPGVEGVNPMTQ

SEQ ID NO: 33492 - protein, 63 aa, Homo sapiens
  MAP TO AC000028.1; EXPRESSED IN FETAL LIVER, SIGNAL = 3.5; EXPRESSED IN LUNG, SIGNAL = 1.9; SWISSPROT HIT: Q13438, EVALUE 4.00e-15
TEKELDPDGLKKESERDRAMLALTSTLNKLIKRLEEKQSPELVKKHKKKRVVPKKPPPSPQPT

SEQ ID NO: 33493 - protein, 77 aa, Homo sapiens
  MAP TO AC008565.5; EXPRESSED IN FETAL LIVER, SIGNAL = 0.41; EXPRESSED IN PLACENTA, SIGNAL = 0.64; SWISSPROT HIT: Q57670, EVALUE 5.80e+00
PGQGKMESKVAEALNDPMLHMLLKDGEDPGAGHASEATVQSYQQVSRPRPGTLLQSWGLYWVVSLSGFAGQAGLTVS

SEQ ID NO: 33494 - protein, 24 aa, Homo sapiens
  MAP TO AL117190.3; EXPRESSED IN FETAL LIVER, SIGNAL = 3.6; EXPRESSED IN PLACENTA, SIGNAL =   3
CQMGHFPLPQQAGPGRGGTKARLC

SEQ ID NO: 33495 - protein, 19 aa, Homo sapiens
  MAP TO AL117190.3; EXPRESSED IN FETAL LIVER, SIGNAL = 3.6; EXPRESSED IN PLACENTA, SIGNAL =   3
VPNGPFSSSPASRAWKGWN

SEQ ID NO: 33496 - protein, 47 aa, Homo sapiens
  MAP TO AL035068.3; EXPRESSED IN FETAL LIVER, SIGNAL =   3; EXPRESSED IN PLACENTA, SIGNAL =   2; EXPRESSED IN HEART, SIGNAL = 1.7; SWISSPROT HIT: Q9Y3I1, EVALUE 5.00e-22
GTEAKALSMPEKWKLSGVYKLQYMHPLCEGSSATLTCVPLGNLIVVN

SEQ ID NO: 33497 - protein, 30 aa, Homo sapiens
  MAP TO AC010507.4; EXPRESSED IN PLACENTA, SIGNAL = 1.7; EXPRESSED IN HEART, SIGNAL = 1.2; EXPRESSED IN FETAL LIVER, SIGNAL = 1.8; EXPRESSED IN HELA, SIGNAL = 1.5
SVPCARNRTHLLRRMDAAPTNQTRTTSGGP

SEQ ID NO: 33498 - protein, 27 aa, Homo sapiens
  MAP TO AC008716.6; EXPRESSED IN PLACENTA, SIGNAL = 0.44; EXPRESSED IN FETAL LIVER, SIGNAL = 0.55
SNRSVRVTIWKAHLKRKQRTQRINASQ

SEQ ID NO: 33499 - protein, 42 aa, Homo sapiens
  MAP TO AC008518.3; EXPRESSED IN FETAL LIVER, SIGNAL = 1.2; EXPRESSED IN HELA, SIGNAL = 0.66
KVNRCPRTTSTWLEALLGLVWERPAASREFATGKAPWVTMKM

SEQ ID NO: 33500 - protein, 97 aa, Homo sapiens
  MAP TO AL121594.3; EXPRESSED IN LUNG, SIGNAL =  10; EXPRESSED IN FETAL LIVER, SIGNAL =  13; SWISSPROT HIT: P12970, EVALUE 3.00e-44
VNTITTLEENKKAQLVVTAHEVDPIKLVVFLLALCHKMGVPYCIIKGKARLGHLVHRKTCTTVNFTQVNSEDKDTLAKLVEAIRTNYNDRYDEIRHH

SEQ ID NO: 33501 - protein, 43 aa, Homo sapiens
  MAP TO AL121594.3; EXPRESSED IN LUNG, SIGNAL =  10; EXPRESSED IN FETAL LIVER, SIGNAL =  13; SWISSPROT HIT: Q60591, EVALUE 4.90e+00
GCLSRPRRKLLAKGTSPLKDHLSFEQELTPSPPWRRTRRLSWW

SEQ ID NO: 33502 - protein, 24 aa, Homo sapiens
  MAP TO AL121594.3; EXPRESSED IN LUNG, SIGNAL =  10; EXPRESSED IN FETAL LIVER, SIGNAL =  13
FPREEAEAVCPGQEESCWQRGRPH

SEQ ID NO: 33503 - protein, 143 aa, Homo sapiens [sequence omitted]

SEQ ID NO: 33504 - protein, 130 aa, Homo sapiens
  MAP TO AL121846.6; EXPRESSED IN FETAL LIVER, SIGNAL = 0.83; SWISSPROT HIT: Q9ZKW6, EVALUE 1.80e+00
ICSKQHNGSPKKFKPKSLEPVNISPYGQEGVCRCDSVKDFDGKIILDYLVGAKCNHSVLTSEKGKQERERKRFDDGSKVQSDEISGCEQRNTKQPLEMEKARKGFSPGTSKKIQFCQHLDFNLARPISDF

SEQ ID NO: 33505 - protein, 48 aa, Homo sapiens
  MAP TO AC004789.1; EXPRESSED IN FETAL LIVER, SIGNAL = 1.1
ALSCTETATSPTSRGSTSPHLVRVTASVPTSCVWPCRCSAAGDRWLCL

SEQ ID NO: 33506 - protein, 56 aa, Homo sapiens
  MAP TO AC004789.1; EXPRESSED IN FETAL LIVER, SIGNAL = 1.1; SWISSPROT HIT: P57737, EVALUE 2.00e-26
SKFRHAQGTVLHRDSHITNLKGLNLTTPGESDGFCANKLRVAVPLLSSGGQVAVLE

SEQ ID NO: 33507 - protein, 61 aa, Homo sapiens
  MAP TO AC019209.3; EXPRESSED IN PLACENTA, SIGNAL = 1.3; EXPRESSED IN FETAL LIVER, SIGNAL = 1.3; SWISSPROT HIT: O13735, EVALUE 4.60e+00
RVVKETAEAVPPQKNAQSNGGEINFSNKLKIHIEEALALTQKLSAENLKKSRSSKTESTQE

SEQ ID NO: 33508 - protein, 62 aa, Homo sapiens; identical to SEQ ID NO: 31097
  MAP TO AB014077.1; EXPRESSED IN FETAL LIVER, SIGNAL = 5.5; SWISSPROT HIT: P36915, EVALUE 3.00e-30

SEQ ID NO: 33509 - protein, 67 aa, Homo sapiens
  MAP TO AB023053.1; EXPRESSED IN PLACENTA, SIGNAL =   1; EXPRESSED IN FETAL LIVER, SIGNAL = 3.8; SWISSPROT HIT: P08547, EVALUE 4.00e-06
EHVPIATPLSKPLQTTVRRLLKKLKVELLYHPSISLMDIYPKEMKLVRQRDTCTPMFTAALFTIAKI

SEQ ID NO: 33510 - protein, 19 aa, Homo sapiens
  MAP TO AC003955.1; EXPRESSED IN FETAL LIVER, SIGNAL = 0.43
SCRSNLLNVFKLSWIWLCL

SEQ ID NO: 33511 - protein, 38 aa, Homo sapiens
  MAP TO AC003955.1; EXPRESSED IN FETAL LIVER, SIGNAL = 0.43
ELQIKPFKCIQIVMDLVVPLTSQAQGVNGDDNDDNVDD

SEQ ID NO: 33512 - protein, 41 aa, Homo sapiens
  MAP TO AC004196.1; EXPRESSED IN FETAL LIVER, SIGNAL = 0.53
MKPNPTKSTTVTVVAARDMRIIPMGVRSLVGFTAVTEVVHR

SEQ ID NO: 33513 - protein, 215 aa, Homo sapiens
  MAP TO AL117376.2; EXPRESSED IN PLACENTA, SIGNAL = 2.9; EXPRESSED IN LUNG, SIGNAL = 2.2; EXPRESSED IN FETAL LIVER, SIGNAL = 1.8; SWISSPROT HIT: P05143, EVALUE 2.00e-21
MWPLLALMHQVTFTLLQPHHVVPDGPSISGHPSPLPQPRHVVPAGPNAPGHPSPLPQPRHVVPAGPNAPGHPSPLPQPRHVVPAGPNAPGHPSPLPQPRHVVPAGPNAPGHPSPLPQPRHVVPAGPNAPGHPSPLPQPRHVVPAGPNAPGHPSPLPQPRHVVPAGPSISGHPSPLPQPRHVAPAGPLAPRWPSPSTPAWRAPPLLLSGEFLLAFS

SEQ ID NO: 33514 - protein, 185 aa, Homo sapiens
  MAP TO AP001760.1; EXPRESSED IN LUNG, SIGNAL = 1.2; EXPRESSED IN FETAL LIVER, SIGNAL = 1.2; EXPRESSED IN HELA, SIGNAL = 1.2; SWISSPROT HIT: O95613, EVALUE 1.00e-82
FLEERKEITEKFSAEQDAFLQEAQEQHARELQLLQERHQQQLLSVTAELEARHQAALGELTASLESKQGALLAARVAELQTKHAADLGALETRHLSSLDSLESCYLSEFQTIREEHRQALELLRADFEEQLWKKDSLHQTILTQELEKLKRKHEGELQSVRDHLRTEVSTELAGTVAHELQGVHQ

SEQ ID NO: 33515 - protein, 213 aa, Homo sapiens
  MAP TO Z83844.5; EXPRESSED IN PLACENTA, SIGNAL = 1.5; EXPRESSED IN HELA, SIGNAL = 0.84; EXPRESSED IN HEART, SIGNAL = 1.8; EXPRESSED IN FETAL LIVER, SIGNAL = 1.6; SWISSPROT HIT: Q00472, EVALUE 5.00e-11
MARCERLRGAALRDVLGRAQGVLFDCDGVLWNGERAVPGAPELLERLARAGKAALFVSNNSRRARPELALRFARLGFGGLRAEQLFSSALCAARLLRQRLPGPPDAPGAVFVLGGEGLRAELRAAGLRLAGDPSAGDGAAPRVRAVLVGYDEHFSFAKLREACAHLRDPECLLVATDRDPWHPLSDGSRTPGERGNGGETEMGATCAFASTPK

SEQ ID NO: 33516 - protein, 46 aa, Homo sapiens
  MAP TO Z83844.5; EXPRESSED IN PLACENTA, SIGNAL = 1.5; EXPRESSED IN HELA, SIGNAL = 0.84; EXPRESSED IN HEART, SIGNAL = 1.8; EXPRESSED IN FETAL LIVER, SIGNAL = 1.6; SWISSPROT HIT: P08175, EVALUE 9.80e-01
PCATCWAGRRGSCSTVTGCCGTASAPCRAPRSCWSGWRGPARRLCL

SEQ ID NO: 33517 - protein, 200 aa, Homo sapiens
  MAP TO AC002097.1; EXPRESSED IN LUNG, SIGNAL =   1; EXPRESSED IN FETAL LIVER, SIGNAL = 1.1; EXPRESSED IN HELA, SIGNAL = 0.56; SWISSPROT HIT: P19835, EVALUE 7.00e-96
DPNMGDSAVPTHWEPYTTENSGYLEITKKMGSSSMKRSLRTNFLRYWTLTYLALPTVTDQEATPVPPTGDSEATPVPPTGDSETAPVPPTGDSGAPPVPPTGDSGAPPVPPTGDSGAPPVPPTGDSGAPPVPPTGDSGAPPVPPTGDSGAPPVPPTGDSGAPPVPPTGDSGPPPCRPRVTPGPPPCRPRVIGRPPRAAHG

SEQ ID NO: 33518 - protein, 34 aa, Homo sapiens; identical to SEQ ID NO: 33225
  MAP TO AC002097.1; EXPRESSED IN LUNG, SIGNAL =   1; EXPRESSED IN FETAL LIVER, SIGNAL = 1.1; EXPRESSED IN HELA, SIGNAL = 0.56; SWISSPROT HIT: Q92020, EVALUE 6.60e+00

SEQ ID NO: 33519 - protein, 151 aa, Homo sapiens
  MAP TO AC012615.1; EXPRESSED IN FETAL LIVER, SIGNAL =   2; EXPRESSED IN HELA, SIGNAL = 0.36; SWISSPROT HIT: Q31791, EVALUE 6.90e+00
MTACRRGLSAQLQSWPVASTRSEAGSTTTAPTARKPRAAARRAAHTARSMWLCMAARSCVEKSRPARALVTCLSSWKDVGQWARASSNWPLVRGGRAGTGTRKGCPRPRGSTAGRGRSSASERGPEAGPARQSSISRAWGLPASRLGRTRL

SEQ ID NO: 33520 - protein, 109 aa, Homo sapiens
  MAP TO AC004923.2; EXPRESSED IN HELA, SIGNAL =   1; EXPRESSED IN PLACENTA, SIGNAL = 1.6; EXPRESSED IN FETAL LIVER, SIGNAL =   1; SWISSPROT HIT: P35894, EVALUE 2.00e-26
YFFLSNLCWADIGFTSATVPKMIVDMQSHSRVTSHAGCLTQMSFLVLFACIEGMLLTVMAYDCFVAICRPLHYPVIVNPHLCVFVLVSFFLSLLDSQLHSWIVLQFTIV

SEQ ID NO: 33521 - protein, 46 aa, Homo sapiens; identical to SEQ ID NO: 32406
  MAP TO AP001717.1; EXPRESSED IN FETAL LIVER, SIGNAL = 1.7; EXPRESSED IN LUNG, SIGNAL = 2.5; EXPRESSED IN HEART, SIGNAL = 1.9

SEQ ID NO: 33522 - protein, 1047 aa, Homo sapiens
  MAP TO AP001717.1; EXPRESSED IN FETAL LIVER, SIGNAL = 1.7; EXPRESSED IN LUNG, SIGNAL = 2.5; EXPRESSED IN HEART, SIGNAL = 1.9; SWISSPROT HIT: P18583, EVALUE 0.00e+00
RSMMSSYERSMMSYERSMMSPMAERSMMSAYERSMMSAYERSMMSPMAERSMMSAYERSMMSAYERSMMSPMADRSMMSMGADRSMMSSYSAADRSMMSSYSAADRSMMSSYTADRSMMSMAADSYTDSYTDTYTEAYMVPPLPPEEPPTMPPLPPEEPPMTPPLPPEEPPEGPALPTEQSALTAENTWPTEVPSSPSEESVSQPEPPVSQSEISEPSAVPTDYSVSASDPSVLVSEAAVTVPEPPPEPESSITLTPVESAVVAEEHEVVPERPVTCMVSETPAMSAEPTVLASEPPVMSETAETFDSMRASGHVASEVSTSLLVPAVTTPVLAESILEPPAMAAPESSAMAVLESSAVTVLESSTVTVLESSTVTVLEPSVVTVPEPPVVAEPDYVTIPVPVVSALEPSVPVLEPAVSVLQPSMIVSEPSVSVQESTVTVSEPAVTVSEQTQVIPTEVAIESTPMILESSIMSSHVMKGINLSSGDQNLAPEIGMQEIALHSGEEPHAEEHLKGDFYESEHGINIDLNINNHLIAKEMEHNTVCAAGTSPVGEIGEEKILPTSETKQRTVLDTYPGVSEADAGETLSSTGPFALEPDATGTSKGIEFTTASTLSLVNKYDVDLSLTTQDTEHDMVISTSPSGGSEADIEGPLPAKDIHLDLPSNNNLVSKDTEEPLPVKESDQTLAALLSPKESSGGEKEVPPPPKETLPDSGFSANIEDINEADLVRPLLPKDMERLTSLRAGIEGPLLASDVGRDRSAASPVVSSMPERASESSSEEKDDYEIFVKVKDTHEKSKKNKNRDKGEKEKKRDSSLRSRSKRSKSSEHKSRKRTSESRSRARKRSSKSKSHRSQTRSRSRSRRRRRSSRSRSKSRGRRSVSKEKRKRSPKHRSKSRERKRKRSSSRDNRKTVRARSRTPSRRSRSHTPSRRRRSRSVGRRRSFSISPSRRSRTPSRRSRTPSRRSRTPSRRSRTPSRRSRTPSRRSRTPSRRRRSRSVVRRRSFSISPVRLRRSRTPLRRRFSRSPIRRKRSRSSERGRSPKRLTDL

SEQ ID NO: 33523 - protein, 31 aa, Homo sapiens
  MAP TO AP001754.1; EXPRESSED IN PLACENTA, SIGNAL = 3.2; EXPRESSED IN FETAL LIVER, SIGNAL = 1.9; EXPRESSED IN LUNG, SIGNAL = 1.5; EXPRESSED IN HEART, SIGNAL = 1.8
GGGGGDGDDGGCDGDGGGGDGSGGSGDVGDD

SEQ ID NO: 33524 - protein, 36 aa, Homo sapiens
  MAP TO AP001754.1; EXPRESSED IN PLACENTA, SIGNAL = 3.2; EXPRESSED IN FETAL LIVER, SIGNAL = 1.9; EXPRESSED IN LUNG, SIGNAL = 1.5; EXPRESSED IN HEART, SIGNAL = 1.8
MVVVVLVLVVVTMVDVVVVMIVMMVIMMAIVMTMVT

SEQ ID NO: 33525 - protein, 35 aa, Homo sapiens
  MAP TO AP001754.1; EXPRESSED IN PLACENTA, SIGNAL = 3.2; EXPRESSED IN FETAL LIVER, SIGNAL = 1.9; EXPRESSED IN LUNG, SIGNAL = 1.5; EXPRESSED IN HEART, SIGNAL = 1.8
GAVVVMVMMVAAMVMVVVVMVVVVVVMLVMMVMWW

SEQ ID NO: 33526 - protein, 180 aa, Homo sapiens
  MAP TO AC011899.2; EXPRESSED IN LUNG, SIGNAL = 2.1; EXPRESSED IN HEART, SIGNAL = 2.3; EXPRESSED IN FETAL LIVER, SIGNAL = 2.1; EXPRESSED IN PLACENTA, SIGNAL = 1.9; EXPRESSED IN HELA, SIGNAL =   3; SWISSPROT HIT: P14918, EVALUE 1.00e-08
QLCRTVYVCDSAPVPTAYVRDPGPVPTAYMRDPGPVPTAYVRDPAYVPDPGPVPTAYVRDPGPVPTAYVRDPAYVPDPGPVPTAYVRDPGPVPTAYVRDPAYVRGPAPVPTVYVRDPAPVPTVYVRDPARIPTAYMRDPAPVLMAGSRYWKRIMRLQIRNPQISFYRWLFSSKLELWVWK

SEQ ID NO: 33527 - protein, 153 aa, Homo sapiens
  MAP TO AC011899.2; EXPRESSED IN LUNG, SIGNAL = 2.1; EXPRESSED IN HEART, SIGNAL = 2.3; EXPRESSED IN FETAL LIVER, SIGNAL = 2.1; EXPRESSED IN PLACENTA, SIGNAL = 1.9; EXPRESSED IN HELA, SIGNAL =   3
SCAERCTCVILRPFLRRTCVILDPFPRRTCVILDPSPRRTCVIRRTCLILDPFPRRTCVILDPSPRRTCVIRRTCLILDPFPRRTCVILDPSPRRTCVIRRTCVVLHPFPRCTCVILRPFPRCTCVILHAFPRRTCVILHPCSWLAAGIGRES

SEQ ID NO: 33528 - protein, 178 aa, Homo sapiens
  MAP TO AL078593.9; EXPRESSED IN PLACENTA, SIGNAL = 1.9; EXPRESSED IN HELA, SIGNAL = 0.91; EXPRESSED IN FETAL LIVER, SIGNAL = 1.1; EXPRESSED IN HEART, SIGNAL = 1.3; EXPRESSED IN LUNG, SIGNAL = 1.5
GSSHSKKTTGSKASASPSTSSTSSRPKASKETVSSKAGTVGTTKGKRKTDKQPITSHLSSDTTTSGTSDLKGEPAETRVESFKLEQTVPGAEEQNTGKFKSMVPPPPVAPAPSPLAPPLPLEDQCITASDTPVVLVSVGADLPVSALDPSQLLWAEEPTNRTTLYSGTGLSVNRENAK

SEQ ID NO: 33529 - protein, 251 aa, Homo sapiens
  MAP TO AL109797.18; EXPRESSED IN FETAL LIVER, SIGNAL = 1.1; EXPRESSED IN LUNG, SIGNAL = 1.3; EXPRESSED IN HELA, SIGNAL = 2.3; SWISSPROT HIT: Q93008, EVALUE 0.00e+00
VDTVKRLLIKKLPPVLAIQLKRFDYDWERECAIKFNDYFEFPRELDMEPYTVAGVAKLEGDNVNPESQLIQQSEQSESETAGSTKYRLVGVLVHSGQASGGHYYSYIIQRNGGDGERNRWYKFDDGDVTECKMDDDEEMKNQCFGGEYMGEVFDHMMKRMSYRRQKRWWNAYILFYERMDTIDQDDELIRYISELAITTRPHQIIMPSAIERSVRKQNVQFMHNRMQYSMEYFQFMKKLLTCNGVYLNPPP

SEQ ID NO: 33530 - protein, 93 aa, Homo sapiens
  MAP TO AL049636.21; EXPRESSED IN HELA, SIGNAL = 0.47; EXPRESSED IN LUNG, SIGNAL = 0.97; EXPRESSED IN FETAL LIVER, SIGNAL =   1; SWISSPROT HIT: Q61060, EVALUE 3.30e+00
AELRRLQPGGGGRRRGTLRPPLRPAPCGGGRCLFAPGSGGGRGCCGGAPVPVRAAAGGTGAASRCAAAALGRAGPQSGRLRLTARPGPAAAAQ

SEQ ID NO: 33531 - protein, 345 aa, Homo sapiens
  MAP TO AL035445.4; EXPRESSED IN HELA, SIGNAL = 0.95; EXPRESSED IN LUNG, SIGNAL = 1.4; EXPRESSED IN FETAL LIVER, SIGNAL = 1.1; SWISSPROT HIT: P08553, EVALUE 6.00e-08
MDEELAKKPCSKIQILKCGGTARSQNSREENKEALKNDIIFTNSVESLKSAHIKEPEREGKGTDLEKDKIGMEVKVDSDAGIPKRQETQLKISEMSIPQGQGAQIKKSVSDVPRGQESQVKKSESGVPKGQEAQVTKSGLVVLKGQEAQVEKSEMGVPRRQESQVKKSQSGVSKGQEAQVKKRESVVLKGQEAQVEKSELKVPKGQEGQVEKTEADVPKEQEVQEKKSEAGVLKGPESQVKNTEVSVPETLESQVKKSESGVLKGQEAQEKKESFEDKGNNDKEKERDAEKDPNKKEKGDKNTKGDKGKDKVKGKRESEINGEKSKGSKRAKANTGRKYNKKVEE

SEQ ID NO: 33532 - protein, 253 aa, Homo sapiens
  MAP TO AJ239319.2; EXPRESSED IN FETAL LIVER, SIGNAL = 1.2; EXPRESSED IN HELA, SIGNAL = 1.2
ISDDDNDDDNGNDLEVPDDNSDDSEAPDDNSDDSEAPDDNSDDSEAPDDNSDDSEAPDDNSDDSDVPDDNSDDSSDDNSDDSSDDNSDDSDVPDDKSDDSDVPDDSSDDSDVPDDSSDDSEAPDDSSDDSEAPDDSSDDSEAPDDSSDDSEAPDDSSDDSEASDDSSDDSEASDDSSDDSEAPDDKSDDSDVPEDKSDDSDVPDDNSDDLEVPVPAEDLCNEGQIASDEEELVEAAAAVSQHDSSDDAGEQDL

SEQ ID NO: 33533 - protein, 177 aa, Homo sapiens
  MAP TO Z69710.1; EXPRESSED IN LUNG, SIGNAL =   2; EXPRESSED IN FETAL LIVER, SIGNAL = 1.7; EXPRESSED IN HELA, SIGNAL = 1.4; SWISSPROT HIT: Q06084, EVALUE 1.10e-01
ISTVKPRSSCSQNTIRLVEPLPGSNTGTTLGAGPGPEPLPGSDTGTTPRAGPEPLPGSDTGREPRPEPDPSLFQAQTREGNHARSRTRASSRLRHGKGTTLGAGPEPLPDSDTGREPRSEPDPSLFQAQTREGNHARSQTRASSRLRHRNILGAGPEQPPVHQLWSEEGLRGCLSPM

SEQ ID NO: 33534 - protein, 155 aa, Homo sapiens
  MAP TO Z69710.1; EXPRESSED IN LUNG, SIGNAL =   2; EXPRESSED IN FETAL LIVER, SIGNAL = 1.7; EXPRESSED IN HELA, SIGNAL = 1.4; SWISSPROT HIT: Q9UL17, EVALUE 1.80e+00
LNSQAKIQLQSKHNTPGGASSRFKHGNHARSWTRTRASSRLRHGNHAQSRTRASSRLRHGKGTTPRAGPEPLPGSDTGREPRSEPDPSLFQAQTREGNHARSRTRASSRLRHGKGTTLGAGPEPLPGSDTGREPRPEPDPSLFQAQTQEHSRSRT

SEQ ID NO: 33535 - protein, 244 aa, Homo sapiens
  MAP TO AC010332.6; EXPRESSED IN HELA, SIGNAL = 0.51; EXPRESSED IN FETAL LIVER, SIGNAL = 0.98; SWISSPROT HIT: P51522, EVALUE 2.00e-62
RSCVLGSNAENKPIKNQLGLTLESHLSELQLFQAGRKIYRSNQVEKFTNHRSSVSPLQKISSSFTTHIFNKYRNDLIDFPLLPQEEKAYIRGKSYEYECSEDGEVFRVPASLTNHQVIHTAEKPYKCTECGKVFSRNSHLVEHWRIHTGQKPYKCSECDKVFNRNSNLARHQRIHTGEKPHKCNECGKAFRECSGLTTHLVIHTGEKPYKCNECGKNFRHKFSLTNHQRSHTAEKPYKCNECGK

SEQ ID NO: 33536 - protein, 20 aa, Homo sapiens
  MAP TO AC010332.6; EXPRESSED IN HELA, SIGNAL = 0.51; EXPRESSED IN FETAL LIVER, SIGNAL = 0.98
GGAVYWEAMQKTSLLKINLD

SEQ ID NO: 33537 - protein, 83 aa, Homo sapiens
  MAP TO AC005837.1; EXPRESSED IN HELA, SIGNAL = 1.1; EXPRESSED IN HEART, SIGNAL =   2; EXPRESSED IN LUNG, SIGNAL = 1.6; EXPRESSED IN FETAL LIVER, SIGNAL = 1.5
LKKGLYSPWQSLSPRHPQGQGGQPSMQSQCQRTMPSTHKPSPRPTPPETEERRPTRHRRRSRTRCPTQHRGQHGRAQKKRKPW

SEQ ID NO: 33538 - protein, 263 aa, Homo sapiens
  MAP TO AP000512.1; EXPRESSED IN FETAL LIVER, SIGNAL = 1.4; EXPRESSED IN HELA, SIGNAL = 1.3; SWISSPROT HIT: P08553, EVALUE 5.00e-07
TLDEPWEVLATQPFCLRESEDSETQPFDTHLEAYGPCLSPPRAIPGDQHPESPVHTEPMGIQGRGRQTVDKVMGIPKETAERVGPERGPLERETEKLLPERQTDVTGEEELTKGKQDREQKQLLARDTQRQESDKNGESASPERDRESLKVEIETSEEIQEKQVQKQTLPSKAFEREVERPVANRECDPAELEEKVPKVILERDTQRGEPEGGSQDQKGQASSPTPEPGVGAGDLPGPTSAPVPSGSQSGGRGSPVSPRRHQK

SEQ ID NO: 33539 - protein, 195 aa, Homo sapiens
  MAP TO AC020667.3; EXPRESSED IN PLACENTA, SIGNAL = 1.9; EXPRESSED IN HELA, SIGNAL =   2; EXPRESSED IN LUNG, SIGNAL =   2; EXPRESSED IN FETAL LIVER, SIGNAL = 2.3; SWISSPROT HIT: Q9UTK5, EVALUE 2.10e-01
GQASVVPHASENLVSQVPQGHLQSMPTGNMRASQELHDLMAARRSKLVQEEPRNPNCQGSCKSQRPMFPPIHKSEKSRKPNLEKHEERLEGLRTPQLTPVRKTEDTHQDEGVQLLPSKKQPPSVSHFGENIKQFFQWIFSKKKSKPAPVTAESQKTVKNRSCVYSSSAEAQGLMTAVGQMLDKKMSLCHAHHASK

SEQ ID NO: 33540 - protein, 82 aa, Homo sapiens
  MAP TO AC020667.3; EXPRESSED IN PLACENTA, SIGNAL = 1.9; EXPRESSED IN HELA, SIGNAL =   2; EXPRESSED IN LUNG, SIGNAL =   2; EXPRESSED IN FETAL LIVER, SIGNAL = 2.3
MGKHLLCPTLQRIWFLKCPRAISRACLLGTCGLPRSYMTSWQPEGANWCKRSPETQTVKAHARAKGQCFPLFTRVRSLGSPT

SEQ ID NO: 33541 - protein, 224 aa, Homo sapiens
  MAP TO AC005664.2; EXPRESSED IN FETAL LIVER, SIGNAL = 1.9; EXPRESSED IN HEART, SIGNAL = 2.7; EXPRESSED IN HELA, SIGNAL = 1.4; SWISSPROT HIT: P51974, EVALUE 2.00e-01
EAVMESRARPFQALPREQSPPPPLQTSSGAEVMDVGSGGDGQSELPAEDPFNFYGASLLSKGSFSKGRLLIDPNCSGHSPRTARHAPAVRKFSPDLKLLKDVKISVSFTESCRSKDRKVLYTGAERDVRAECGLLLSPVSGDVHACPFGGSVGDGVGIGGESADKKDEENELDQEKRVEYAVLDELEDFTDNLELDEEGAGGFTAKAIVQRDRVDEEALNFPYE

SEQ ID NO: 33542 - protein, 22 aa, Homo sapiens
  MAP TO AC005664.2; EXPRESSED IN FETAL LIVER, SIGNAL = 1.9; EXPRESSED IN HEART, SIGNAL = 2.7; EXPRESSED IN HELA, SIGNAL = 1.4
PSKRCPVSSLHHLPCKRPVVQR

SEQ ID NO: 33543 - protein, 367 aa, Homo sapiens
  MAP TO AC018432.4; EXPRESSED IN LUNG, SIGNAL = 0.95; EXPRESSED IN FETAL LIVER, SIGNAL = 1.1; EXPRESSED IN HELA, SIGNAL = 1.5; SWISSPROT HIT: P04958, EVALUE 6.00e-03
KNRRKTPDSKSKLSLNVPSLKAKKTPTSQVFQITVCHTLKNRNELGCKNNTEKKELHERKDISDIALHLISVSKLILPYVKNYSRKQLVKVMPGLIKCGHFLQKQNKSPDTEKINYAGPLEETGISDITKKEKEYDKENKRLKNISPKMLPQLEQSFMVNTVQLKAPCLLVETNGKSKESLKDSITQAKGIGITEFHVLNSKKPFDLHIPKHKTSLEEAISKPMQKLVSSPEMESNNRMKIQEDLQSSENSHLQLSNGEELPTSTPKTQRCFPRENTQKQKDFLELVLELSNVGLLISPGSKMHKSSEELEAIKIQVNTESVNLKESKPLILNVTEDSDLRESEELECNTGSNITNMHQDKETSDAF

SEQ ID NO: 33544 - protein, 19 aa, Homo sapiens
  MAP TO AC018432.4; EXPRESSED IN LUNG, SIGNAL = 0.95; EXPRESSED IN FETAL LIVER, SIGNAL = 1.1; EXPRESSED IN HELA, SIGNAL = 1.5
KIEEKHQTVKANSVLMFHL

SEQ ID NO: 33545 - protein, 533 aa, Homo sapiens
  MAP TO AL136311.2; EXPRESSED IN HELA, SIGNAL = 4.2; EXPRESSED IN FETAL LIVER, SIGNAL =   2; EXPRESSED IN PLACENTA, SIGNAL = 1.8; SWISSPROT HIT: P17012, EVALUE 2.00e-12
HCRNAGPVAVAEKSITQVAEKFILRGYCPDCNQVFVDETSTQNHKQNSGHKVRVINSVEESVLLYCHSSEGNKDPSSDLHLLLDQSKFSSLKRTMSIKESSSLECIAIPKKKMNLKDKSHEGVACVQKEKSVVKTWFCECNQRFPSEDAVEKHVFSANTMGYKCVVCGKVCDDSGVIRLHMSRIHGGAHLNNFLFWCRTCKKELTRKDTIMAHVTEFHNGHRYFYEMDEVEGETLPSSSTTLDNLTANKPSSAITVIDHSPANSSPRGKWQCRICEDMFDSQEYVKQHCMSLASHKFHRYSCAHCRKPFHKIETLYRHCQDEHDNEIKIKYFCGLCDLIFNVEEAFLSHYEEHHSIDYVFVSEKTETSIKTEDDFPVIETSNQLTCGCRESYICKVNRKEDYSRCLQIMLDKGKLWFRCSLCSATAQNLTDMNTHIHQVHKEKSDEEEQQYVIKCGTCTKAFHDPESAQQHFHRKHCFLQKPSVAHFGSEKSNLYKFTASASHTERKLKQAINYSKSLDMEKGVENDLSYQNI

SEQ ID NO: 33546 - protein, 18 aa, Homo sapiens
  MAP TO AL136311.2; EXPRESSED IN HELA, SIGNAL = 4.2; EXPRESSED IN FETAL LIVER, SIGNAL =   2; EXPRESSED IN PLACENTA, SIGNAL = 1.8
CLLKNLAHWSALPFQKRR

SEQ ID NO: 33547 - protein, 34 aa, Homo sapiens
  MAP TO AC004586.1; EXPRESSED IN HELA, SIGNAL = 3.4; EXPRESSED IN FETAL LIVER, SIGNAL = 1.3
AGTPAGAGRRARVAAGRCWPGVLLGRGQVSGGGG

SEQ ID NO: 33548 - protein, 152 aa, Homo sapiens
  MAP TO AC004586.1; EXPRESSED IN HELA, SIGNAL = 3.4; EXPRESSED IN FETAL LIVER, SIGNAL = 1.3; SWISSPROT HIT: P21827, EVALUE 2.20e-01
TPRSPHPRRLHSGHPAPIRPAGGGRLELSGSASGAAGRCKDAWASEGLLAVLRAGPGPEALLQVWAAESALRGEPLWAQNVVPEAEGEDDPAGEAQAGRLPLLPCARAYVSPRAPFYRPLAPELRARQLELGAEHALLLDAAGQVFSWGGGR

SEQ ID NO: 33549 - protein, 34 aa, Homo sapiens
  MAP TO AC008524.5; EXPRESSED IN HEART, SIGNAL = 1.7; EXPRESSED IN FETAL LIVER, SIGNAL = 1.1; SWISSPROT HIT: P08721, EVALUE 5.00e+00
AVDGDAREDGPHDESQDDCNGQEGDGNQLVVAFE

SEQ ID NO: 33550 - protein, 225 aa, Homo sapiens
  MAP TO AL136980.2; EXPRESSED IN HELA, SIGNAL =   4; EXPRESSED IN FETAL LIVER, SIGNAL = 1.5; SWISSPROT HIT: Q09417, EVALUE 2.00e-43
LPFCPPVVLAQSVENVWTTCRANKQKRHLLEALWLSCGGAGMKVWLPLFPRDHRKPHSFLSQRIMLPFHINIYPLAVLFEDALVLGAVNDTLLYDSLYTRNNAREQLEVLFPFCVVERTSQIYLHHILRQLLVRNLGEQALLLAQSCATLPYFPHVLELMLHEVLEEEATSREPIPDPLLPTVAKFITEFPLFLQTVVHCARKTEYALWNYLFAAVGNPKDLFEE

SEQ ID NO: 33551 - protein, 190 aa, Homo sapiens
  MAP TO AC011307.1; EXPRESSED IN FETAL LIVER, SIGNAL =   1; SWISSPROT HIT: P21147, EVALUE 8.10e-01
ILKCKKDKAYEGGQLCAMCFSPKKLYKHEIHKLKDLTCLKPSIESPLRQNRSRSIEEEQKQEENGDSQLILEKIQLPQWSISLNMTDEHGNLVNLVCDIKKPMDVYKIHLNQTDPPDIDINAMVALDFEYPMTQENYENLWKLIAYYSEVPMKLHRELMLSKHPRVSYQYRQDADEEALYYTGVRAQILA

SEQ ID NO: 33552 - protein, 25 aa, Homo sapiens
  MAP TO AC011307.1; EXPRESSED IN FETAL LIVER, SIGNAL =   1
KLMKAVSCVQCASVQRSCTNMRFTS

SEQ ID NO: 33553 - protein, 222 aa, Homo sapiens
  MAP TO AC008752.3; EXPRESSED IN HELA, SIGNAL =   2; EXPRESSED IN HEART, SIGNAL = 1.5; EXPRESSED IN FETAL LIVER, SIGNAL = 1.3; EXPRESSED IN LUNG, SIGNAL = 1.4; SWISSPROT HIT: O95897, EVALUE 0.00e+00
MDGYYKGRRVLEFRTLGDFIKGQNFIQHLLPQPWAGTGHVVYNGSLFYNKYQSNVVVKYHFRSRSVLVQRSLPGAGYNNTFPYSWGGFSDMDFMVDESGLWAVYTTNQNAGNIVVSRLDPHTLEVMRSWDTGYPKRSAGEAFMICGVLYVTNSHLAGAKVYFAYFTNTSSYEYTDVPFHNQYSHISMLDYNPRERALYTWNNGHQVLYNVTLFHVISTSGDP

SEQ ID NO: 33554 - protein, 142 aa, Homo sapiens
  MAP TO AC008752.3; EXPRESSED IN HELA, SIGNAL =   2; EXPRESSED IN HEART, SIGNAL = 1.5; EXPRESSED IN FETAL LIVER, SIGNAL = 1.3; EXPRESSED IN LUNG, SIGNAL = 1.4; SWISSPROT HIT: P11137, EVALUE 6.00e-01
WMAITKAAGSWSSVPWETSSKARTLSSTCCPSRGRARATWCTTAPCSITSTRATWWSNTTSARALCWCRGASRAPVTTTPSPTPGAASPTWTSWWTRAGSGLCTPPTRTRATSWSAGWTRTPSRSCGPGTPATPSAALARPS

SEQ ID NO: 33555 - protein, 37 aa, Homo sapiens
  MAP TO AL157971.2; EXPRESSED IN HELA, SIGNAL = 0.48; EXPRESSED IN FETAL LIVER, SIGNAL = 0.92
MPALPPYLRQVEVEETERGELETGGEAVEQPVGEEVQ

SEQ ID NO: 33556 - protein, 202 aa, Homo sapiens
  MAP TO AC009470.2; EXPRESSED IN FETAL LIVER, SIGNAL = 1.9; EXPRESSED IN PLACENTA, SIGNAL = 1.9; SWISSPROT HIT: P05784, EVALUE 7.60e+00
MEAEAGGLEELTDEEMAALGKEELVRRLRREEAARLAALVQRGRLMQEVNRQLQGHLGEIRELKQLNRRLQAENRELRDLCCFLDSERQRGRRAARQWQLFGTQASRAVREDLGGCWQKLAELEGRQEELLRENLALKELCLALGEEWGPRGGPSGAGGSGAGPAPELALPPCGPRDLGDGSSSTGSVGSPDQLPLACSPDD

SEQ ID NO: 33557 - protein, 228 aa, Homo sapiens
  MAP TO AL050329.9; EXPRESSED IN HELA, SIGNAL = 1.8; EXPRESSED IN LUNG, SIGNAL = 1.1; EXPRESSED IN FETAL LIVER, SIGNAL = 0.98; SWISSPROT HIT: Q03254, EVALUE 2.60e-01
LELHRPNLLLGLIIRQKLKRQHSACASTSHIAETPESAPPIALPPDKKSKIEVSTEEAPEEENDFFNSFTTVLHKQRNKPQQNLQEDLPTAVEPLMEVTKQEPPKPLRFLPGVLIGWENQPTTLELANKPLPVDDILQSLLGTTGQVYDQAQSVMEQNTVKEIPFLNEQTNSKIEKTDNVEVTDGENKEIKVKVDNISESTDKSAEIETSVVGSSSISAGSLTSLSLR

SEQ ID NO: 33558 - protein, 20 aa, Homo sapiens
  MAP TO AL050329.9; EXPRESSED IN HELA, SIGNAL = 1.8; EXPRESSED IN LUNG, SIGNAL = 1.1; EXPRESSED IN FETAL LIVER, SIGNAL = 0.98
ISSWRVDWLGESTYYSGISK

SEQ ID NO: 33559 - protein, 81 aa, Homo sapiens
  MAP TO AL021395.14; EXPRESSED IN PLACENTA, SIGNAL = 3.5; EXPRESSED IN FETAL LIVER, SIGNAL = 5.8; EXPRESSED IN HEART, SIGNAL = 2.5; SWISSPROT HIT: P77770, EVALUE 2.60e+00
KWKSNLSKLSAVSNDYLLAGLAIPGPRVLHGLHNLHAFFHLAEDHMLAIQPLSLGSADEKLGIVCVGSSICHGQDARTCML

SEQ ID NO: 33560 - protein, 67 aa, Homo sapiens
  MAP TO AL078639.5; EXPRESSED IN HEART, SIGNAL = 2.2; EXPRESSED IN LUNG, SIGNAL = 1.3; EXPRESSED IN FETAL LIVER, SIGNAL = 2.1; SWISSPROT HIT: O08808, EVALUE 4.10e-01
LPASPGLPASARLPTSPRLPASLCLPASSCLPTTTQSSINWLNIHVFQRLQCADLLTFRSSSVCNIQ

SEQ ID NO: 33561 - protein, 128 aa, Homo sapiens
  MAP TO AL078639.5; EXPRESSED IN HEART, SIGNAL = 2.2; EXPRESSED IN LUNG, SIGNAL = 1.3; EXPRESSED IN FETAL LIVER, SIGNAL = 2.1; SWISSPROT HIT: Q90508, EVALUE 8.00e-02
SKKSGSSRKSVSSSKSTSSNKAMSSRLSMSSRKSLSSLKSIASEKSRSSRKSVSSSKSTSSNKAMSSIKLMSSSLLVSSNKGTSSNKGTSSNKGMSSNKGTSSRKSTSSNQAMSSRKSTSSRKYMSSN

SEQ ID NO: 33562 - protein, 215 aa, Homo sapiens
  MAP TO AC007956.5; EXPRESSED IN PLACENTA, SIGNAL = 2.1; EXPRESSED IN FETAL LIVER, SIGNAL = 2.7; EXPRESSED IN LUNG, SIGNAL = 2.5; EXPRESSED IN HELA, SIGNAL = 3.9; SWISSPROT HIT: P14197, EVALUE 4.00e-04
TMSVDMQLRHYEMQQQQFQHLYQEWEREFQLWEEQLHSYPHKDQLQEYEKQWKTWQGHMKATQSYLQEKVNSFQNMKNQYMGNMSMPPPFVPYSQMPPPLPTMPPPVLPPSLPPPVMPPALPATVPPPGMPPPVMPPSLPTSVPPPGMPPSLSSAGPPPVLPPPSLSSAGPPPVLPPPSLSSTAPPPVMPLPPLSSATPPPGIPPPGVPQGIPPQ

SEQ ID NO: 33563 - protein, 35 aa, Homo sapiens
  MAP TO AC007956.5; EXPRESSED IN PLACENTA, SIGNAL = 2.1; EXPRESSED IN FETAL LIVER, SIGNAL = 2.7; EXPRESSED IN LUNG, SIGNAL = 2.5; EXPRESSED IN HELA, SIGNAL = 3.9
NGSESFSYGRNNSIPILIKISFRSMRSSGKHGRDI

SEQ ID NO: 33564 - protein, 185 aa, Homo sapiens
  MAP TO AP001067.1; EXPRESSED IN FETAL LIVER, SIGNAL = 0.95; EXPRESSED IN HELA, SIGNAL = 0.46; SWISSPROT HIT: P11929, EVALUE 4.10e+00
EVQQAGWQLDCWQHEEDDSEQVGTQHTALQQTGTRQDCWQEEEAQQAGWQLDCWQHEEAPQQTGTQHTGLQQTGTQQACWQGEEVQQAGWQLDCWQHEGVQELVQPDWQALGSQAAWQQGLDTQLTGVQTRVRQGAGAQQLGVPQGSSQQLSGQSSTCQELVQALEQMDMVEAAMLEWGGGELGE

SEQ ID NO: 33565 - protein, 26 aa, Homo sapiens
  MAP TO AF002993.1; EXPRESSED IN HELA, SIGNAL = 0.92; EXPRESSED IN FETAL LIVER, SIGNAL = 1.6
TPSKALDLASASPPTMTGPPPPAKCE

SEQ ID NO: 33566 - protein, 470 aa, Homo sapiens
  MAP TO AF001549.1; EXPRESSED IN LUNG, SIGNAL =  19; EXPRESSED IN FETAL LIVER, SIGNAL =  14; EXPRESSED IN PLACENTA, SIGNAL =  18; EXPRESSED IN HELA, SIGNAL = 3.5; SWISSPROT HIT: Q9UKF5, EVALUE 2.90e-01
VRMAAAEHRHSSGLPYWPYLTAETLKNRMGHQPPPPTQQHSITDNSLSLKTPPECLLTPLPPSADDNLKTPPECVLTPLPPSADDNLKTPPECVLTPLPPSADDNLKTPPECLLTPLPPSADDKLKTPPECLLTPLPPSALPSAPPSADDNLKTRAECLLHPLPPSADDNLKTPSERQLTPLPPSAPPSADDNIKTPAERLRGPLPPSADDNLKTPSERQLTPLPPSAPPSADDNIKTPAERLRGPLPPSADDNLKTPSERQLTPLPPSAPPSADDNIKTPAFHPQRMIISRHLPSVSSLPFHPQLHPQQMIISRYLLSVCGFRFHHQPMIISRHLPSVSSLPFHPQLHPQQMIISRHLPSVCGGRFHPQRMIISRHLPSVSSLPFHPQLHPQQMIISRHLPSVCGGRFHPQRMIISRHLPSVSSLPFHPQLHPQQMIISRHLPSVCGGRFHPQRMIISRHLPSVSSLPF

SEQ ID NO: 33567 - protein, 223 aa, Homo sapiens
  MAP TO AC008015.5; EXPRESSED IN HELA, SIGNAL = 1.3; EXPRESSED IN FETAL LIVER, SIGNAL = 0.98; SWISSPROT HIT: P41891, EVALUE 8.10e+00
CGLMDELVHDLASALEQTSEQNKLGELWEEMALSPRQQRRQLRKRRGRKRRSDFTHLAEHTCCYSEASESSLDEATKDCREVAPVTNFSDSDDTMVAKRHPALNAIVKSKQHSWHESDSFTENAPCRPLRRRRKVKRVTSEVAASLQQKLKVSDWSYERGCRFKSAKKQRLSRWKENTPWTSSGHGLCESAENRTFLSKTGRKERMECETDEQKQGSDENMSE

SEQ ID NO: 33568 - protein, 150 aa, Homo sapiens
  MAP TO AC005618.1; EXPRESSED IN FETAL LIVER, SIGNAL = 0.98; EXPRESSED IN HELA, SIGNAL = 0.75; SWISSPROT HIT: Q9Y5E1, EVALUE 1.00e-23
TDGTLDWERIPEYNVTITATDKGKPPLSSSTSLTLRIGEVNDNAPVFHQVSYVVHVAENNLPGASIPQVSASDLDLGLNGQVSYSIVTTDLELRALSSYVSVSAQSGVVVAQRAFDHEQLCAFELTMQAHDQGSPALSANMSRRMLVGDL

SEQ ID NO: 33569 - protein, 178 aa, Homo sapiens
  MAP TO AL132777.2; EXPRESSED IN HELA, SIGNAL = 0.78; EXPRESSED IN FETAL LIVER, SIGNAL =   1; SWISSPROT HIT: Q9UIU6, EVALUE 3.00e-70
NISVSSSTSDGSTFTSESTTVQQGKVFLSSLAPSAVVYTVPNTGQTIGSVKQEGLERSLVFSQLMPVNQNAQVNANLSSENISGSGLHPLASSLVNVSPTHNFSLSPSTLLNPTELNRDIADSQPMSAPVASKSTVTSVSNTNYATLQNCSLITGQDLLSVPMTQAALGEIVPTAEDQ

SEQ ID NO: 33570 - protein, 228 aa, Homo sapiens
  MAP TO AL356460.1; EXPRESSED IN FETAL LIVER, SIGNAL =  20; SWISSPROT HIT: P02248, EVALUE 1.00e-36
MQIFVKTLTGKTITLEVEPSDTIENVKAKIQDKEGIPPDQQRLIFAGKQLEDGRTLSDYNIQKESTLHLVLRLRGGMQIFVKTLTGKTITLEVEPSDTIENVKAKIQDKEGIPPDQQRLIFAGKQLEDGRTLSDYNIQKESTLHLVLRLRGGMQIFVKTLTGKTITLEVEPSDTIENVKAKIQDKEGIPPDQQRLIFAGKQLEDGRTLSDYNIQKESTLHLVLRLRGG

SEQ ID NO: 33571 - protein, 122 aa, Homo sapiens
  MAP TO U52111.1; EXPRESSED IN FETAL LIVER, SIGNAL = 0.97; EXPRESSED IN HELA, SIGNAL = 0.82; SWISSPROT HIT: P48410, EVALUE 8.00e-64
TYYRVSNMDGRLRNPDQSLTEDVVAFAASVAHLYSNLTKPLLDVAVTSYTLLRAARSRGAGTAWPSAIAGLVVFLTANVLRAFSPKFGELVAEEARRKGELRYMHSRVVANSEEIAFYGGHE

SEQ ID NO: 33572 - protein, 66 aa, Homo sapiens
  MAP TO U52111.1; EXPRESSED IN FETAL LIVER, SIGNAL = 0.97; EXPRESSED IN HELA, SIGNAL = 0.82
AGFWLAAAAVAPHRPPCYLRQQCHPLPGGPTGPVVPQPSGGPRLPPLLLPADLLPGQQHGRAASQP

SEQ ID NO: 33573 - protein, 98 aa, Homo sapiens
  MAP TO AC013533.3; EXPRESSED IN PLACENTA, SIGNAL = 1.7; EXPRESSED IN FETAL LIVER, SIGNAL = 1.1; SWISSPROT HIT: O42632, EVALUE 1.20e+00
MSGRSPLLPREYYSDPSGAARVPKEPPLYRDPGVSRPVPSYGVLGSRTSWDPMQGRSPALQDAGHLYRDPGGKMIPQGRQTQSRAASPGRYGREQPDT

SEQ ID NO: 33574 - protein, 201 aa, Homo sapiens
  MAP TO AL162171.1; EXPRESSED IN HEART, SIGNAL = 1.6; EXPRESSED IN FETAL LIVER, SIGNAL = 1.5; EXPRESSED IN PLACENTA, SIGNAL = 1.7; SWISSPROT HIT: Q16825, EVALUE 1.00e-102
NLFVPNQNGYYCHSQTSLDRAQIDLNGRIRNGSVYSAHSTNSLNNPQPYLQPSPMSSNPSITGSDVMRPDYLPSHRHSAVIPPSYRPTPDYETVMKQLNRGLVHAERQSHSLRNLNIGSSYAYSRPAALVYSQPEIREHAQLPSPAAAHCPFSLSYSFHSPSPYPYPAERRPVVGAVSVPELTNAQLQAQDYPSPNIMRTQ

SEQ ID NO: 33575 - protein, 43 aa, Homo sapiens
  MAP TO AL162171.1; EXPRESSED IN HEART, SIGNAL = 1.6; EXPRESSED IN FETAL LIVER, SIGNAL = 1.5; EXPRESSED IN PLACENTA, SIGNAL = 1.7; SWISSPROT HIT: P47179, EVALUE 8.40e+00
ITSLCPTRTDTTVTLRQAWIEPRLTSTVGSVMAVSTVHTAPTP

SEQ ID NO: 33576 - protein, 189 aa, Homo sapiens
  MAP TO AL157879.2; EXPRESSED IN FETAL LIVER, SIGNAL = 3.1; SWISSPROT HIT: P54197, EVALUE 1.50e-01
APTMDAQQDRPKSQDCLGLVAPLASAAEVSSTAPVSGKKQRPPGPLFSSSDPLPATSSHSRDSAQVTSMIPAPFTAASRDAGMRRTRSAPAAAAAAPPPSTLNPTSGSLLNAVDGGPSHFLASATAAARAQRSEVRYNQRSQISRTRSCLKRNASSSSHSSTEGLPELKRRRGPASSHCQLAHSSSKTV

SEQ ID NO: 33577 - protein, 244 aa, Homo sapiens
  MAP TO AP001725.1; EXPRESSED IN HELA, SIGNAL = 8.6; EXPRESSED IN FETAL LIVER, SIGNAL =   3; SWISSPROT HIT: Q9Y316, EVALUE 0.00e+00
YTYCGSCAAHAYKQVDPSITRRIFILGPSHHVPLSRCALSSVDIYRTPLYDLRIDQKIYGELWKTGMFERMSLQTDEDERSIEMHLPYTAKAMESHKDEFTIIPLLVGALSQKNRNSELFSKYLADPSNLFVVSSDFCHWGQRFRHSYYDESQGEICRSIEHLDKMGMSIIEQLDPVSFSNYLKKYHNTICGRHPIGVLLNAITELQKNGMNMSFSFLNYAQSSQCRNWQDSSVSYAAGALTVH

SEQ ID NO: 33578 - protein, 29 aa, Homo sapiens
  MAP TO AP001725.1; EXPRESSED IN HELA, SIGNAL = 8.6; EXPRESSED IN FETAL LIVER, SIGNAL =   3
AAQAPRCPTEWSAEKPVTPGAGTQPQDRS

SEQ ID NO: 33579 - protein, 263 aa, Homo sapiens
  MAP TO AL096712.14; EXPRESSED IN HELA, SIGNAL = 0.92; EXPRESSED IN FETAL LIVER, SIGNAL = 0.93; SWISSPROT HIT: P46821, EVALUE 1.00e-03
SLNGVWLNRARLEPLRVYSIHQGDYIQLGVPLENKENAEYEYEVTEEDWETIYPCLSPKNDQMIEKNKELRTKRKFSLDELAGPGAEGPSNLKSKINKVSCESGQPVKSQGKGEVASTPSDNLDPKLTALEPSKTTGAPIYPGFPKVTEVHHEQKASNSSASQRSLQMFKVTMSRILRLKIQMQEKHEAVMNVKKQTQKGNSKKVVQMEQELQDLQSQLCAEQAQQQARVEQLEKTFQEEEQHLQVPHRREGQEWSSGVGQAL

SEQ ID NO: 33580 - protein, 323 aa, Homo sapiens
  MAP TO AL035665.29; EXPRESSED IN FETAL LIVER, SIGNAL = 1.6; SWISSPROT HIT: P54842, EVALUE 1.00e-127
MAAELSMGPELPTSPLAMEYVNDFDLLKFDVKKEPLGRAERPGRPCTRLQPAGSVSSTPLSTPCSSVPSSPSFSPTEQKTHLEDLYWMASNYQQMNPEALNLTPEDAVEALIGSHPVPQPLQSFDSFRGAHHHHHHHHPHPHHAYPGAGVAHDELGPHAHPHHHHHHQASPPPSSAASPAQQLPTSHPGPGPHATASATAAGGNGSVEDRFSDDQLVSMSVRELNRHLRGFTKDEVIRLKQKRRTLKNRGYAQSCRYKRVQQKHHLENEKTQLIQQVEQLKQEVSRLARERDAYKVKCEKLANSGFREAGSTSDSPSSPEFFL

SEQ ID NO: 33581 - protein, 52 aa, Homo sapiens
  MAP TO AL035665.29; EXPRESSED IN FETAL LIVER, SIGNAL = 1.6
AGPAHACSQPARCPPHRSALRVAPCPRRPASARPNRRHTSRICTGWRATTSR

SEQ ID NO: 33582 - protein, 28 aa, Homo sapiens
  MAP TO AP000111.1; EXPRESSED IN HELA, SIGNAL = 1.3; EXPRESSED IN FETAL LIVER, SIGNAL =   1; SWISSPROT HIT: Q92543, EVALUE 1.00e+00
NLPPSHSPSPSIKGPLFLCEKRKKQSML

SEQ ID NO: 33583 - protein, 52 aa, Homo sapiens
  MAP TO AC007106.6; EXPRESSED IN FETAL LIVER, SIGNAL = 0.96; SWISSPROT HIT: O58655, EVALUE 8.10e+00
LGSISLQWLSRENLGRSQSESLGPEFQGLWKWLPGELNSPIFSEVPHRCDTA

SEQ ID NO: 33584 - protein, 152 aa, Homo sapiens
  MAP TO Z83844.5; EXPRESSED IN HEART, SIGNAL = 2.6; EXPRESSED IN FETAL LIVER, SIGNAL = 2.5; EXPRESSED IN PLACENTA, SIGNAL = 2.2
GFSCWMVLLGEEALGLSRRAQDVLGFSCWMVLLGEEALGSSRRAQDVLGLSCWVVLLGEEALGLSRWAQDVLGLSRVALLGEEVLEALGLSRWAQDVVGLSRVALLGEEALGLSRWAQDVLGLSRVALLGEEVLEALGLSRWAQDVVGLSRA

SEQ ID NO: 33585 - protein, 36 aa, Homo sapiens
  MAP TO AL035701.13; EXPRESSED IN PLACENTA, SIGNAL = 1.5; EXPRESSED IN HEART, SIGNAL = 1.3; EXPRESSED IN FETAL LIVER, SIGNAL = 1.6; EXPRESSED IN HELA, SIGNAL = 1.3
RLCLCHGNILGFNPQTLKRQNLFFQSLIFFSFFLEY

SEQ ID NO: 33586 - protein, 20 aa, Homo sapiens
  MAP TO AC007463.3; EXPRESSED IN HELA, SIGNAL = 2.3; EXPRESSED IN FETAL LIVER, SIGNAL = 0.98; EXPRESSED IN LUNG, SIGNAL = 1.1
PAPCIKKMTLSSWEDFNARK

SEQ ID NO: 33587 - protein, 24 aa, Homo sapiens
  MAP TO AC008174.2; EXPRESSED IN FETAL LIVER, SIGNAL = 1.4; EXPRESSED IN HELA, SIGNAL = 0.8
KLPEEGYDADTLESGMETLTIAGL

SEQ ID NO: 33588 - protein, 61 aa, Homo sapiens
  MAP TO AL024497.5; EXPRESSED IN PLACENTA, SIGNAL = 1.5; EXPRESSED IN FETAL LIVER, SIGNAL = 1.1
HFPRGGGALTLNVSNFITYISHDGAHGEALGLVRMQKEEGKAWAISFSGVSVGKGRAEETV

SEQ ID NO: 33589 - protein, 74 aa, Homo sapiens
  MAP TO CHR17.1; EXPRESSED IN ADULT LIVER, SIGNAL = 1.1; EXPRESSED IN FETAL LIVER, SIGNAL = 0.74; EXPRESSED IN HEART, SIGNAL = 0.48; SWISSPROT HIT: P43620, EVALUE 1.20e+00
HAFRNYEQIVKAHRDNPHEGEDQVSDQVKFNVFQGIMDSLFQSFNASISVASFQELSACVFSWIEEHCKPQVWG

SEQ ID NO: 33590 - protein, 108 aa, Homo sapiens
  MAP TO CHR12.1; EXPRESSED IN ADULT LIVER, SIGNAL = 0.88; EXPRESSED IN FETAL LIVER, SIGNAL = 0.87; EXPRESSED IN LUNG, SIGNAL = 0.98; SWISSPROT HIT: O95239, EVALUE 1.10e+00
TFPVSWQLTKNGTVESVEADGLTLDDVSDEDIDVENVEVDDYFFLQPLPTKRRRALLRASGVHRIDAEEKQELRAIRLSREECGCDCRLYCDPEACACSQAGIKCQVS

SEQ ID NO: 33591 - protein, 65 aa, Homo sapiens
  MAP TO CHR7.1; EXPRESSED IN FETAL LIVER, SIGNAL = 0.42; SWISSPROT HIT: O60443, EVALUE 2.00e-31
KMFAKATRNFLREVDADGDLIAVSNLNDSDKLQLLSLVTKKKRFWCWQRPKYQFLSLTLGDVLIE

SEQ ID NO: 33592 - protein, 33 aa, Homo sapiens
  MAP TO CHR19.1; EXPRESSED IN FETAL LIVER, SIGNAL = 0.39; EXPRESSED IN LUNG, SIGNAL = 0.78; SWISSPROT HIT: P29820, EVALUE 8.60e+00
LVPGWLCVRLEPGRKIPLHLRDSLHLSGSLTGK

SEQ ID NO: 33593 - protein, 70 aa, Homo sapiens
  MAP TO CHR9.1; EXPRESSED IN FETAL LIVER, SIGNAL = 1.1; EXPRESSED IN HEART, SIGNAL = 0.59; EXPRESSED IN ADULT LIVER, SIGNAL = 0.79; SWISSPROT HIT: Q92574, EVALUE 2.00e-30
FLTFIAFYRWKRLETHDVVIECAKISLDPTEASYEDGYSVSHQISARFPHRSADVTTSPYADTQNSYGKK

SEQ ID NO: 33594 - protein, 54 aa, Homo sapiens
  MAP TO CHR6.1; EXPRESSED IN LUNG, SIGNAL =  38; EXPRESSED IN ADULT LIVER, SIGNAL = 5.6; EXPRESSED IN FETAL LIVER, SIGNAL = 5.9; SWISSPROT HIT: Q49128, EVALUE 9.60e-01
SPSLLHLRVTGSGSPSCCTWHVYLCSSPEGTTTAAHFWKVPSPAGLVSTSSVSW

SEQ ID NO: 33595 - protein, 42 aa, Homo sapiens
  MAP TO CHR7.1; EXPRESSED IN FETAL LIVER, SIGNAL = 0.93; EXPRESSED IN LUNG, SIGNAL = 1.7; EXPRESSED IN HEART, SIGNAL = 1.1; EXPRESSED IN ADULT LIVER, SIGNAL = 0.69; SWISSPROT HIT: P17024, EVALUE 3.00e-13
PVAFEDVAVNFTQEEWTLLDISQKNLFREVMLETFRNLTSIG

SEQ ID NO: 33596 - protein, 57 aa, Homo sapiens
  MAP TO CHR2.1; EXPRESSED IN FETAL LIVER, SIGNAL = 0.42; EXPRESSED IN LUNG, SIGNAL = 0.62; SWISSPROT HIT: P89083, EVALUE 2.10e+00
YHFCELVFTGHPNLLRGQWTIKGQGSMQASLLSCCTHCVMDSEKHGTPQEHPRLSQT

SEQ ID NO: 33597 - protein, 42 aa, Homo sapiens
  MAP TO CHR7.1; EXPRESSED IN LUNG, SIGNAL = 1.3; EXPRESSED IN FETAL LIVER, SIGNAL = 1.2; EXPRESSED IN HEART, SIGNAL = 1.3; EXPRESSED IN ADULT LIVER, SIGNAL =   2
LSSAILADFGNLHTAHFILLNIIVCLAFFLCEKSLFTCINYV

SEQ ID NO: 33598 - protein, 79 aa, Homo sapiens
  MAP TO CHR1.1; EXPRESSED IN LUNG, SIGNAL = 1.3; EXPRESSED IN HEART, SIGNAL = 1.8; EXPRESSED IN FETAL LIVER, SIGNAL = 1.7; SWISSPROT HIT: Q61116, EVALUE 1.00e-41
QRVHTGEKPYKCDTCGKAFSQRSNLQVHQIIHTGEKPFKCEECGKEFSWSAGLSAHQRVHTGEKPYTCQQCGKGFSQAS

SEQ ID NO: 33599 - protein, 117 aa, Homo sapiens
  MAP TO CHR11.1; EXPRESSED IN FETAL LIVER, SIGNAL = 0.55; EXPRESSED IN LUNG, SIGNAL = 0.86; EXPRESSED IN HEART, SIGNAL = 0.85; SWISSPROT HIT: P54902, EVALUE 5.90e+00
QAHLDLGIEAAQAAAHAALEHGVIIVVGIAQGLLEALQGLLEDAEAQEGIAHAQADLASELGTCPGTRQPKAGLAVGDGLVKLAQLLVAACQVQVALQEEVGILQLPGRVDLDHSEL

SEQ ID NO: 33600 - protein, 75 aa, Homo sapiens
  MAP TO CHR17.1; EXPRESSED IN FETAL LIVER, SIGNAL = 1.2; EXPRESSED IN ADULT LIVER, SIGNAL = 0.9; SWISSPROT HIT: P28929, EVALUE 8.40e-01
HLERLALELIDDSPDLPQQEGPGVDEVDPVHHDGDDAVPALEAPGQAVLDEEGVAEHKAVLLISEEDGAFTARAD

SEQ ID NO: 33601 - protein, 64 aa, Homo sapiens
  MAP TO CHR6.1; EXPRESSED IN FETAL LIVER, SIGNAL = 0.97; EXPRESSED IN HEART, SIGNAL = 0.83; EXPRESSED IN ADULT LIVER, SIGNAL = 1.5; SWISSPROT HIT: P02918, EVALUE 2.70e+00
QFPCPSLGRERSDIPTQKGNAEVLAENGVEDEALEPAWEQLCVPDPEAAQQPCTFLLSPGTEAE

SEQ ID NO: 33602 - protein, 51 aa, Homo sapiens
  MAP TO CHR17.1; EXPRESSED IN ADULT LIVER, SIGNAL = 0.88; EXPRESSED IN FETAL LIVER, SIGNAL = 0.99; EXPRESSED IN HEART, SIGNAL = 0.79; SWISSPROT HIT: Q42942, EVALUE 5.70e-01
ALRGGPGQARRPLLRCGGHRAGATALVEDHGDLPGLVALLPDQWPECPSGE

SEQ ID NO: 33603 - protein, 74 aa, Homo sapiens
  MAP TO CHR7.1; EXPRESSED IN HEART, SIGNAL = 1.2; EXPRESSED IN FETAL LIVER, SIGNAL = 1.5; EXPRESSED IN LUNG, SIGNAL = 1.1; SWISSPROT HIT: P47755, EVALUE 1.00e-37
KVLITEHGDLGNGKFLDPKNRICFKFDHLRKEATDPRPCEVENAVESWRTSVETALRAYVKEHYPNGVCTVSHQ

SEQ ID NO: 33604 - protein, 37 aa, Homo sapiens
  MAP TO CHRX.1; EXPRESSED IN ADULT LIVER, SIGNAL = 0.99; EXPRESSED IN HEART, SIGNAL = 0.79; EXPRESSED IN FETAL LIVER, SIGNAL = 0.94; SWISSPROT HIT: Q10161, EVALUE 8.50e+00
LCSTDFQQALYELSYHVIKGNLKHEQASNVLSDISVS

SEQ ID NO: 33605 - protein, 74 aa, Homo sapiens
  MAP TO CHRX.1; EXPRESSED IN FETAL LIVER, SIGNAL = 0.61; EXPRESSED IN HEART, SIGNAL = 0.71; SWISSPROT HIT: P33861, EVALUE 2.20e+00
NDFKVGMKLEARDPRNATSVCIATVIGITGARLRLRLDGSDNRNDFWRLVDSPDIQPVGTCEKEGDLLQPPLGK

SEQ ID NO: 33606 - protein, 43 aa, Homo sapiens
  MAP TO CHR18.1; EXPRESSED IN FETAL LIVER, SIGNAL = 6.1; EXPRESSED IN LUNG, SIGNAL =  13; EXPRESSED IN ADULT LIVER, SIGNAL = 8.5; SWISSPROT HIT: P57970, EVALUE 6.40e+00
LSLPTIATLLPVITPLSLGIQRILALLVLCHFVGLVLATLLTE

SEQ ID NO: 33607 - protein, 66 aa, Homo sapiens
  MAP TO CHR19.1; EXPRESSED IN ADULT LIVER, SIGNAL = 1.3; EXPRESSED IN FETAL LIVER, SIGNAL = 1.3; EXPRESSED IN LUNG, SIGNAL = 1.2; EXPRESSED IN HEART, SIGNAL = 1.9; SWISSPROT HIT: P38250, EVALUE 3.00e-03
QDTFQDYQEMFVQFGYVVLFSSAFPLAALCALVNNLIEIRSDAFKLCTGLQRPFGQRVESIGQWQV

SEQ ID NO: 33608 - protein, 80 aa, Homo sapiens
  MAP TO CHR20.1; EXPRESSED IN FETAL LIVER, SIGNAL =   1; EXPRESSED IN ADULT LIVER, SIGNAL = 0.67; EXPRESSED IN LUNG, SIGNAL = 0.59; SWISSPROT HIT: P14635, EVALUE 2.00e-41
QNNCVPKKMLQLVGVTAMFIASKYEEMYPPEIGDFAFVTDNTYTKHQIRQMEMKILRALNFGLGRPLPLHFLRRASKIGE

SEQ ID NO: 33609 - protein, 133 aa, Homo sapiens
  MAP TO CHR2.1; EXPRESSED IN FETAL LIVER, SIGNAL = 0.93; EXPRESSED IN LUNG, SIGNAL = 0.59; SWISSPROT HIT: Q14896, EVALUE 1.00e-03
DAPKVILRTSLEVKRGDEIALDASISGSPYPTITWIKDENVIVPEEIKKRAAPLVRRRKGEVQEEEPFVLPLTQRLSIDNSKKGESQLRVRDSLRPDHGLYMIKVENDHGIAKAPCTVSVLGESLKLHFPMEK

SEQ ID NO: 33610 - protein, 45 aa, Homo sapiens
  MAP TO CHR19.1; EXPRESSED IN HEART, SIGNAL = 4.2; EXPRESSED IN FETAL LIVER, SIGNAL =  58; EXPRESSED IN LUNG, SIGNAL =  31
GTYMGVRAGRTQGMKIQKGLVQLFLQGHGSFHGVWGFTPLIFSWL

SEQ ID NO: 33611 - protein, 59 aa, Homo sapiens
  MAP TO CHR7.1; EXPRESSED IN HEART, SIGNAL = 0.87; EXPRESSED IN LUNG, SIGNAL = 1.3; EXPRESSED IN FETAL LIVER, SIGNAL = 0.95; SWISSPROT HIT: P08243, EVALUE 1.00e-32
QKFPFNTPKTKEGYYYRQVFERHYPGRADWLSHYWMPKWINATDPSARTLTHYKSAVKA

SEQ ID NO: 33612 - protein, 49 aa, Homo sapiens
  MAP TO CHR17.1; EXPRESSED IN FETAL LIVER, SIGNAL = 0.43; EXPRESSED IN HEART, SIGNAL = 0.73; SWISSPROT HIT: P57267, EVALUE 4.80e+00
FLPLKNLAEVCSILATDHRSGWMCPFIIFFPLPPCSRLSSVLPEHVSGF

SEQ ID NO: 33613 - protein, 69 aa, Homo sapiens
  MAP TO CHR4.1; EXPRESSED IN ADULT LIVER, SIGNAL = 0.78; EXPRESSED IN FETAL LIVER, SIGNAL =   1; SWISSPROT HIT: Q14103, EVALUE 5.00e-28
HFNTAFCLYRKMFIGGLSWDTTKKDLKDYFSKFGEVVDCTLKLDPITGRSRGFGFVLFKESESVDKVVC

SEQ ID NO: 33614 - protein, 77 aa, Homo sapiens
  MAP TO CHRX.1; EXPRESSED IN FETAL LIVER, SIGNAL = 0.43; EXPRESSED IN HEART, SIGNAL = 0.48; SWISSPROT HIT: P22105, EVALUE 2.00e-13
TELCTMECGSHGVCSRGICQCEEGWVGPTCEERSCHSHCTEHGQCKDGKCECSPGWEGDHCTIGKYHHTLTKVSWIS

SEQ ID NO: 33615 - protein, 39 aa, Homo sapiens
  MAP TO CHR3.1; EXPRESSED IN FETAL LIVER, SIGNAL = 1.7; EXPRESSED IN LUNG, SIGNAL = 3.7; EXPRESSED IN HEART, SIGNAL = 1.3
ANMETTCNLARLYCVASRTCSTLPAVILLIIQGSSKSQE

SEQ ID NO: 33616 - protein, 61 aa, Homo sapiens
  MAP TO CHR19.1; EXPRESSED IN FETAL LIVER, SIGNAL = 0.84; EXPRESSED IN LUNG, SIGNAL = 1.5; EXPRESSED IN HEART, SIGNAL = 1.1; EXPRESSED IN ADULT LIVER, SIGNAL = 0.59
TYPRCECRPGHRGQDLGAGARPREPASSGAASAAAGRIASPGHPSRLPPETASQPWRALAL

SEQ ID NO: 33617 - protein, 58 aa, Homo sapiens
  MAP TO CHR7.1; EXPRESSED IN FETAL LIVER, SIGNAL = 0.47; SWISSPROT HIT: Q14168, EVALUE 7.00e-20
HLEFDRHEIQIYEEVAKMPPFQRKTLVLIGAQGVGRRSLKNRFIVLNPTRFGTTVPCK

SEQ ID NO: 33618 - protein, 33 aa, Homo sapiens
  MAP TO CHR7.1; EXPRESSED IN ADULT LIVER, SIGNAL = 1.5; EXPRESSED IN FETAL LIVER, SIGNAL = 1.7; EXPRESSED IN LUNG, SIGNAL = 1.2; EXPRESSED IN HEART, SIGNAL = 1.8
KCLCRNCKCFQTNCAFIKFIENIIILLITVISI

SEQ ID NO: 33619 - protein, 34 aa, Homo sapiens
  MAP TO CHR7.1; EXPRESSED IN FETAL LIVER, SIGNAL =   1; EXPRESSED IN HEART, SIGNAL = 1.1
CLFDLSLGILTAHILVDLFKICIGGYMAHWIAHH

SEQ ID NO: 33620 - protein, 29 aa, Homo sapiens
  MAP TO CHR5.1; EXPRESSED IN FETAL LIVER, SIGNAL = 0.58
SCEGITLADFHIVGILPFVIGKLHNSVSD

SEQ ID NO: 33621 - protein, 54 aa, Homo sapiens
  MAP TO CHR14.1; EXPRESSED IN FETAL LIVER, SIGNAL = 0.4; EXPRESSED IN LUNG, SIGNAL = 1.7; SWISSPROT HIT: P23083, EVALUE 5.00e-26
LSTGAHSQVQLVQSGAEVKKPGASVKVSCKASGYTFTGYYMHWVRQAPGQGLEW

SEQ ID NO: 33622 - protein, 91 aa, Homo sapiens
  MAP TO CHR16.1; EXPRESSED IN FETAL LIVER, SIGNAL = 7.1; EXPRESSED IN LUNG, SIGNAL = 9.8; SWISSPROT HIT: P02248, EVALUE 3.00e-24
TITLEVEPSDTIENVKAKIQGKEGIPPDQQRLIFAGKQLEDGRTLSDYNIQKESTLHLVLRLLVVLRKGRRSLTPLPRRISTRERRLSWLS

SEQ ID NO: 33623 - protein, 59 aa, Homo sapiens
  MAP TO CHR7.1; EXPRESSED IN ADULT LIVER, SIGNAL = 0.59; EXPRESSED IN FETAL LIVER, SIGNAL = 0.34; SWISSPROT HIT: P00533, EVALUE 1.60e+00
SSHSWPGEQSHHLGNLDLCQPAASVACWGMGEEGLEMSGQLAFITKPSLLERPIMNFLD

SEQ ID NO: 33624 - protein, 45 aa, Homo sapiens
  MAP TO CHR19.1; EXPRESSED IN FETAL LIVER, SIGNAL = 0.63; SWISSPROT HIT: P51869, EVALUE 2.00e-12
SLFQAKWRHLAEGSAVSLDMFEHISLMTLDSLQKCVFSYNSNCQE

SEQ ID NO: 33625 - protein, 81 aa, Homo sapiens
  MAP TO CHR22.1; EXPRESSED IN FETAL LIVER, SIGNAL = 0.35; SWISSPROT HIT: Q11057, EVALUE 2.10e+00
SFLARKLRGERWVLPELPPWLLRKDVSPKTSPPRPTCMVWRKSPSGWLIMSAVSRLFPCELDTQPTGESLPRLMVAAPLPP

SEQ ID NO: 33626 - protein, 207 aa, Homo sapiens
  MAP TO AL121757.2; EXPRESSED IN HELA, SIGNAL = 3.8; EXPRESSED IN LUNG, SIGNAL = 2.1; EXPRESSED IN HEART, SIGNAL = 1.6; SWISSPROT HIT: P28834, EVALUE 2.80e+00
MHQALDWAAGIWFTGRLGLREHKSLAQGDSVCPCESELGDFQVYGLVSTEGVVSCFGEKTPQHPGPPASLSLANRCHNVVTAVGAWPAHGSILGNVPEAPVGADVLGAGGCDWADKEALAPGQRAKVHILLESSGQSDPSYAVLPDSWAATEGFPTYRSQVSSPRIPGSSIWLGSGSGWPILGELRECDQMFSCMLPTGCASFQDPG

SEQ ID NO: 33627 - protein, 38 aa, Homo sapiens
  MAP TO AC005736.1; EXPRESSED IN HEART, SIGNAL = 1.5; SWISSPROT HIT: Q09461, EVALUE 3.80e+00
MGPSRPGSSAPPSCCTTSGETPSTSPAGWTPPAWSAAS

SEQ ID NO: 33628 - protein, 25 aa, Homo sapiens
  MAP TO AC005736.1; EXPRESSED IN HEART, SIGNAL = 1.5
HPRPGGWQHRTVSHRRDCQPGAFCP

SEQ ID NO: 33629 - protein, 248 aa, Homo sapiens
  MAP TO AC005736.1; EXPRESSED IN HEART, SIGNAL = 1.5; SWISSPROT HIT: O60503, EVALUE 0.00e+00
ECYRVLNELIGDFDELLSKPDYSSIEKIKTIGATYMAASGLNTAQAQDGSHPQEHLQILFEFAKEMMRVVDDFNNNMLWFNFKLRVGFNHGPLTAGVIGTTKLLYDIWGDTVNIASRMDTTGVECRIQVSEESYRVLSKMGYDFDYRGTVNVKGKGQMKTYLYPKCTDHRVIPQHQLSISPDIRVQVDGSIGRSPTDEIANLVPSVQYVDKTSLGSDSSTQAKDAHLSPKRPWKEPVKAEERGRFGKA

SEQ ID NO: 33630 - protein, 190 aa, Homo sapiens
  MAP TO AL133476.4; EXPRESSED IN HELA, SIGNAL = 0.74; EXPRESSED IN LUNG, SIGNAL = 1.1; EXPRESSED IN HEART, SIGNAL = 2.2
IIQTHYQPWGFLSAAHTVCPGLFEELLLLLQPLALLPFSLDLLFQHRLLQSGQQQRQHKELLRVSQDLLLSAHSTLQLARARGQEGPGDVDRAAQGERVKGVGASEGGEEEEEEEETEEVAEAAGGSGRARWARGGQAGWWYQLMQSSQVYIDGSIEGSRFPRGSSNSSSEKKKGAGGGGPPQAPPPREG

SEQ ID NO: 33631 - protein, 33 aa, Homo sapiens
  MAP TO AL133476.4; EXPRESSED IN HELA, SIGNAL = 0.74; EXPRESSED IN LUNG, SIGNAL = 1.1; EXPRESSED IN HEART, SIGNAL = 2.2
CRAPRSTSMAPLRVPGSLVVAATAAARKRKGQE

SEQ ID NO: 33632 - protein, 202 aa, Homo sapiens
  MAP TO AC000093.3; EXPRESSED IN HELA, SIGNAL = 0.55; EXPRESSED IN HEART, SIGNAL = 2.2; SWISSPROT HIT: P13224, EVALUE 3.00e-59
PRGALSLLLLLLAPPSRPAAGCPAPCSCAGTLVDCGRRGLTWASLPTAFPVDTTELVLTGNNLTALPPGLLDALPALRTAHLGANPWRCDCRLVPLRAWLAGRPERAPYRDLRCVAPPALRGRLLPYLAEDELRAACAPGPLCWGALAAQLALLGLGLLHALLLVLLLCRLRRLRARARARAAARLSLTDPLVAERAGTDES

SEQ ID NO: 33633 - protein, 26 aa, Homo sapiens
  MAP TO AC000093.3; EXPRESSED IN HELA, SIGNAL = 0.55; EXPRESSED IN HEART, SIGNAL = 2.2
AARGAELTAPAAGPAEPPGRRLPGAL

SEQ ID NO: 33634 - protein, 301 aa, Homo sapiens
  MAP TO AC010320.7; EXPRESSED IN HELA, SIGNAL = 1.6; EXPRESSED IN HEART, SIGNAL = 1.9; EXPRESSED IN LUNG, SIGNAL = 1.4; SWISSPROT HIT: Q05481, EVALUE 3.00e-53
ILPKCMTKELPPIGNSNTGEKCQTVTLERHECYDVENFYLREIQKNLQDLEFQWKDGEINYKEVPMTYKNNLNGKRGQHSQEDVENKCIENQLTLSFQSRLTELQKFQTEGKIYECNQSEKTVNNSSLVSPLQRILPSVQTNISKKYENEFLQLSLPTQLEKTHIREKPYICKGCGKAFRVSSSLINHQMVHTTEKPYKCNECGKAFHRGSLLTIHQIVHTRGKPYQCGVCGKIFRQNSDLVNHRRSHTGEKPYKCNECGKSFSQSYNLAIHQRIHTGEKPYKCNECGKTFKQAHASLHIR

SEQ ID NO: 33635 - protein, 50 aa, Homo sapiens
  MAP TO AL049869.5; EXPRESSED IN PLACENTA, SIGNAL = 1.4; EXPRESSED IN LUNG, SIGNAL = 2.3; EXPRESSED IN HEART, SIGNAL = 1.4; SWISSPROT HIT: P41755, EVALUE 1.00e-02
AVGDGRRRGLVDDAQHIEPRDGACVLGGLALRVVEIGRDRYDRAVHLAPQ

SEQ ID NO: 33636 - protein, 163 aa, Homo sapiens
  MAP TO AL121790.2; EXPRESSED IN LUNG, SIGNAL = 3.4; EXPRESSED IN HEART, SIGNAL = 3.3; EXPRESSED IN PLACENTA, SIGNAL = 2.2; SWISSPROT HIT: Q9Z8B6, EVALUE 3.30e+00
MEGRVGAGVRGARGVLAALRAALGAAAPASAPAPAAGPRLLLALEALLAAQVAAVLEHVAGVRVQRPVGALARLVRGACHLDEAVIEGQRVADGVLPALLVLPVIGEEVHDPLVDLAQREHLAGRLLDGHGDERDVRVGRLGVRVAALERLGVAAAARAAAAQ

SEQ ID NO: 33637 - protein, 491 aa, Homo sapiens
  MAP TO Z84479.1; EXPRESSED IN HELA, SIGNAL = 0.2; EXPRESSED IN HEART, SIGNAL = 1.7; SWISSPROT HIT: Q62577, EVALUE 4.00e-17
DCAAAEKCCINVCGLHSCVAARFPGSPAAPTTAASCEGFVCPQQGSDCDIWDGQPVCRCRDRCEKEPSFTCASDGLTYYNRCYMDAEACLRGLHLHIVPCKHVLSWPPSSPGPPETTARPTPGAAPVPPALYSSPSPQAVQVGGTASLHCDVSGRPPPAVTWEKQSHQRENLIMRPDQMYGNVVVTSIGQLVLYNARPEDAGLYTCTARNAAGLLRADFPLSVVQREPARDAAPSIPAPAECLPDVQACTGPTSPHLVLWHYDPQRGGCMTFPARGCDGAARGFETYEACQQACARGPGDACVLPAVQGPCRGWEPRWAYSPLLQQCHPFVYGGCEGNGNNFHSRESCEDACPVPRTPPCRACRLRSKLALSLCRSDFAIVGRLTEVLEEPEAAGGIARVALEDVLKDDKMGLKFLGTKYLEVTLSGMDWACPCPNMTAGDGPLVIMGEVRDGVAVLDAGSYVRAASEKRVKKILELLEKQACELLNRFQD

SEQ ID NO: 33638 - protein, 159 aa, Homo sapiens
  MAP TO Z84479.1; EXPRESSED IN HELA, SIGNAL = 0.2; EXPRESSED IN HEART, SIGNAL = 1.7
TVRLLRSAASTCVDCTAAWQHASPAAQLRRRQRPPARALCAHSRARTATSGTGSPCAAAATAVRRSPASPAPRTASPTTTAAIWTPRPACGACTSTSCPASTCSAGRPAARGRRRPLPAPHLGPRPCLLPCTAAPPHRRCRLGVRPASTATSAAARRLL

SEQ ID NO: 33639 - protein, 222 aa, Homo sapiens
  MAP TO AC013648.3; EXPRESSED IN PLACENTA, SIGNAL = 2.5; EXPRESSED IN HEART, SIGNAL = 1.3; EXPRESSED IN LUNG, SIGNAL = 0.98; EXPRESSED IN HELA, SIGNAL = 6.5; SWISSPROT HIT: gi1351900, EVALUE 3.00e-25
SFGVSAPGKSIEASADVSALKVEADVSLPSMQGDLKTTDLSVQPPSADLEVQAGQVDVKLPEGPVPEGAGLKGHLPKLQMPSFKMPKVDLKGPQIDVKGPKLDLKGPKTDVMAPDVEVSQPSVEVDVEAPGAKLDGAWLEGDLSVADKDVTTKDSRFKIPKFKMPSFGVSAPGKSIAASVDVSAPKVEADGSLPSMQGDLKATDLSIQPPSADLEVQAGQVD

SEQ ID NO: 33640 - protein, 93 aa, Homo sapiens
  MAP TO AC003663.1; EXPRESSED IN HEART, SIGNAL = 1.3; EXPRESSED IN LUNG, SIGNAL = 1.4; EXPRESSED IN HELA, SIGNAL = 1.1; SWISSPROT HIT: O75962, EVALUE 1.00e+00
GLMKLGTVERQGAMGIWKELFCELSPLEFRLYLSNEEHTCVENCSLLRCESVGPAHSDGRFELVFSGKKLALRASSQDEAEDWLDRVREALQK

SEQ ID NO: 33641 - protein, 50 aa, Homo sapiens
  MAP TO AC003663.1; EXPRESSED IN HEART, SIGNAL = 1.3; EXPRESSED IN LUNG, SIGNAL = 1.4; EXPRESSED IN HELA, SIGNAL = 1.1
PGSHEAGHRGAAGGNGHLEGALLRALPTGVPPLPEQRGAHLCGELLPASL

SEQ ID NO: 33642 - protein, 227 aa, Homo sapiens
  MAP TO AP000030.1; EXPRESSED IN HELA, SIGNAL = 0.57; EXPRESSED IN HEART, SIGNAL = 3.2
APGILAAVSRGGSGRTPAHPRPAVLTRDGRPGSPRRGRARCGAAVPLGLRAPRRPRSCRAARPTAAALLCRPRSNPLVVCQSELSGPLRLRPRGPGRGSPWETELRLGRLTIAPPPASQSEAVDAGAGRSELGCRATMGARRVSAPQPGSERAAGGARAARAPEMPSCEAPSARPGEIARRQRRRGGPGDDQGAPNKAALGGPEASASLGDRSAKLPVISHRWRWPM

SEQ ID NO: 33643 - protein, 195 aa, Homo sapiens
  MAP TO AC008655.3; EXPRESSED IN HELA, SIGNAL = 0.98; EXPRESSED IN HEART, SIGNAL = 1.3; SWISSPROT HIT: Q14003, EVALUE 1.00e-63
MIYYAERIGADPDDILGSNHTYFKNIPIGFWWAVVTMTTLGYGDMYPKTWSGMLVGALCALAGVLTIAMPVPVIVNNFGMYYSLAMAKQKLPKKKNKHIPRPPQPGSPNYCKPDPPPPPPPHPHHGSGGISPPPPITPPSMGVTVAGAYPAGPHTHPGLLRGGAGGLGIMGLPPLPAPGEPCPLAQEEVIEINRA

SEQ ID NO: 33644 - protein, 32 aa, Homo sapiens
  MAP TO AC008655.3; EXPRESSED IN HELA, SIGNAL = 0.98; EXPRESSED IN HEART, SIGNAL = 1.3
MWPSPPSSSSSSPSPPSAWKPMRASSILATRR

SEQ ID NO: 33645 - protein, 408 aa, Homo sapiens
  MAP TO AC005849.1; EXPRESSED IN HELA, SIGNAL = 0.75; EXPRESSED IN HEART, SIGNAL = 1.4; SWISSPROT HIT: P55641, EVALUE 4.00e-13
LHLVESDPNHFASQLVQTFIHFDMTEHRRDEENARLLAELVRARGLKLDGCFSYWDDCLVLTALLCQELGLPCSSPAAMRLAKQKSLTQLHLLHHHGPPWPAPSLHAVPCCPLESEADVERAVHQVPLPGVMKLEFGAGAVGVRLVEDAPQCHEHFSRITRDLQGEADHPGIGLGWGNAMLLMEFVEGTEHDVDLVLFGGRLLAAFVSDNGPTRLPGFTETAACMPTGLAPEQEAQMVQAAFRCCLGCGLLDGVFNVELKLTGAGPRLIEINPRMGGFYLRDWILELYGVDLLLAAVMVACGLRPALPTRPRARGHLVGVMCLVSQHLQALSSTASRETLQALHDRGLLRLNLLEEALVPGEYEEPYCSVACAGPSPTEARLRLLGLCQGLGIDGPSYPVAHFLSHFK

SEQ ID NO: 33646 - protein, 224 aa, Homo sapiens
  MAP TO Z92544.1; EXPRESSED IN HELA, SIGNAL = 0.79; EXPRESSED IN HEART, SIGNAL = 1.2; SWISSPROT HIT: O14186, EVALUE 4.00e-10
GWLATGGRDKMVKVWDMTTHRAKEMHCVQTIASVARVKWRPECRHHLATCSMMVDHNIYVWDVRRPFVPAAMFEEHRDVTTGIAWRHPHDPSFLLSGSKDSSLCQHLFRDASQPVERANPEGLCYGLFGDLAFAAKESLVAAESGRKPYTGDRRHPIFFKRKLDPAEPFAGLASSALSVFETEPGGGGMRWFVDTAERYALAGRPLAELCDHNAKVARELGRNQ

SEQ ID NO: 33647 - protein, 282 aa, Homo sapiens
  MAP TO AL031715.2; EXPRESSED IN HEART, SIGNAL = 1.8; SWISSPROT HIT: O95180, EVALUE 0.00e+00
EAVHTDSLEGKIDSPRDTLDPAEPGEKTPVRPVTQGGSLQSPPHSPRPASVRTRKHTFGQRCVSSRPAAPGGKDADASDPSDEEVSHITSSACPWQPTAEPHGPEASPVAGGERDLRRLYSVDAQGFLDKPGRADEQWRPSAELGSGEPGEAKAWGPEAEPALGARRKKKMSPPCISVEPPAEDEGSARPSAAEGGSTTLRRRTPSCEATPHRDSLEPTEGSGAGGDPAAKGERWGQASCRAEHLTVPSFAFEPLDLGVPSGDPFLDGSHSVTPESRASSSG

SEQ ID NO: 33648 - protein, 58 aa, Homo sapiens
  MAP TO AL035681.13; EXPRESSED IN HEART, SIGNAL =  22; SWISSPROT HIT: P39188, EVALUE 8.50e-02
RVSLCCPGFSVVARPWLTAALTSGLKRSSDCSLFLLHSCCLGTSLCHHPGISLYLLPV

SEQ ID NO: 33649 - protein, 189 aa, Homo sapiens; identical to SEQ ID NO: 32641
  MAP TO AP000346.1; EXPRESSED IN HELA, SIGNAL = 0.29; SWISSPROT HIT: P10264, EVALUE 5.00e-62

SEQ ID NO: 33650 - protein, 26 aa, Homo sapiens
  MAP TO AP000346.1; EXPRESSED IN HELA, SIGNAL = 0.29; SWISSPROT HIT: P10263, EVALUE 6.10e-01
VDRVVHCMQSLMKPENRAILRHGGSW

SEQ ID NO: 33651 - protein, 48 aa, Homo sapiens
  MAP TO AL079300.11; EXPRESSED IN HELA, SIGNAL =   1
HAVVAHTASSEAVSGVLCGRCGLSRPWKGAACFPEPPVCPPDGGTSRQ

SEQ ID NO: 33652 - protein, 18 aa, Homo sapiens
  MAP TO AC008831.7; EXPRESSED IN HELA, SIGNAL = 0.6
TDVFENTSTTQMLAGQLW

SEQ ID NO: 33653 - protein, 157 aa, Homo sapiens
  MAP TO AC004205.1; EXPRESSED IN HELA, SIGNAL = 0.61; EXPRESSED IN PLACENTA, SIGNAL = 0.51; SWISSPROT HIT: P03340, EVALUE 5.00e-14
EERSMTHRAAMTIWECEHPPGQNVPAAKQKFPTQDSQWDNNNIAHRRNMRDLQEMIIKGIRESLPCTQNMTKAFNIQQGKDEGLMEFFNRLKEQMRKYAGLDGGDPLGQGMLKLHFVTNSWPDVTKKLQKTENWKDCPTEELLREAQKVYVRRDEEK

SEQ ID NO: 33654 - protein, 28 aa, Homo sapiens
  MAP TO AC009145.4; EXPRESSED IN PLACENTA, SIGNAL = 1.1; EXPRESSED IN HEART, SIGNAL =   1; EXPRESSED IN HELA, SIGNAL = 0.94; EXPRESSED IN LUNG, SIGNAL = 1.1
WRWYIMGQGQESWIPYSVQYKDVYSPRC

SEQ ID NO: 33655 - protein, 83 aa, Homo sapiens
  MAP TO AC018514.6; EXPRESSED IN HELA, SIGNAL = 0.91; EXPRESSED IN PLACENTA, SIGNAL = 0.7; SWISSPROT HIT: Q10187, EVALUE 1.40e+00
ASQSSEEQHSHPKEKDELRGTDGMPTDVYQVHVPLRKETRVPPKGTLLFNSQVSDNKPKTLLRLQQECPRQCMSMYDPFLIFS

SEQ ID NO: 33656 - protein, 61 aa, Homo sapiens
  MAP TO AC018514.6; EXPRESSED IN HELA, SIGNAL = 0.91; EXPRESSED IN PLACENTA, SIGNAL = 0.7; SWISSPROT HIT: Q10350, EVALUE 9.40e-01
QASHRKNNTATLKRKMSCEALMACPLMCIKCTSRCGKRHVFLQKALCFLTLRSQTTNQRHS

SEQ ID NO: 33657 - protein, 73 aa, Homo sapiens
  MAP TO AC008620.5; EXPRESSED IN HELA, SIGNAL =  22; EXPRESSED IN HEART, SIGNAL =   9; SWISSPROT HIT: O42248, EVALUE 1.00e-28
KTIIMWKLTRDETNYGIPQRALRGHSHFVSDVVISSDGQFALSGSWDGTLRLWDLTTQVAAHLALGPWEESGQ

SEQ ID NO: 33658 - protein, 67 aa, Homo sapiens
  MAP TO AC002237.1; EXPRESSED IN HELA, SIGNAL = 0.44; SWISSPROT HIT: Q62245, EVALUE 1.20e+00
PLSSMGLATCVPISHSIPLKVPGLHMADPEPHASLLEEESASRVTSAHPSEFNLDITSSRRPSPAEP

SEQ ID NO: 33659 - protein, 69 aa, Homo sapiens
  MAP TO AC068323.6; EXPRESSED IN HELA, SIGNAL = 0.64
ETKKTVILTILDDSEPEDDESIIVSLVYTEGGSRILPSSDTVRVNILANDNVAGIVSFQTASRSVIGHE

SEQ ID NO: 33660 - protein, 47 aa, Homo sapiens
  MAP TO AC008685.6; EXPRESSED IN PLACENTA, SIGNAL = 0.6; EXPRESSED IN HELA, SIGNAL = 0.51; EXPRESSED IN LUNG, SIGNAL = 0.56
SYHLLWSWRHPWDRKLSCPACWLHWMTPSATKPTPKIEPRTRLENVG

SEQ ID NO: 33661 - protein, 25 aa, Homo sapiens
  MAP TO AC008685.6; EXPRESSED IN PLACENTA, SIGNAL = 0.6; EXPRESSED IN HELA, SIGNAL = 0.51; EXPRESSED IN LUNG, SIGNAL = 0.56; SWISSPROT HIT: P53544, EVALUE 3.00e+00
VITCFGAGGILGTENCPALPAGYIG

SEQ ID NO: 33662 - protein, 74 aa, Homo sapiens
  MAP TO AC006290.1; EXPRESSED IN HELA, SIGNAL = 0.49; EXPRESSED IN HEART, SIGNAL = 1.2
ITNNITSRRTPPMNNITGRSTPPTILRVILSPFFSRYFEEYHRGVYTPCDIGSNIIPYPSGYYKQYHRGCTPLV

SEQ ID NO: 33663 - protein, 37 aa, Homo sapiens
  MAP TO AC006290.1; EXPRESSED IN HELA, SIGNAL = 0.49; EXPRESSED IN HEART, SIGNAL = 1.2; SWISSPROT HIT: Q07352, EVALUE 8.50e+00
ILKNITGEYTPPAILEVISFPTLPDITNNITGGVHPL

SEQ ID NO: 33664 - protein, 117 aa, Homo sapiens
  MAP TO AC004496.1; EXPRESSED IN HEART, SIGNAL = 2.4; EXPRESSED IN LUNG, SIGNAL = 0.4; EXPRESSED IN HELA, SIGNAL = 1.9; SWISSPROT HIT: Q64739, EVALUE 5.80e-01
VKKHGIKEVSGERKTQKAASNGTQIRSKLKRTKQTATKTKTLQGPAEKKPPSGSQAPRTKKQRVTKWQASEPAHSVNGEGGVLASAPDPPVLRETAQNTQTGNQQEPSPNLSREKTR

SEQ ID NO: 33665 - protein, 58 aa, Homo sapiens
  MAP TO AC005953.1; EXPRESSED IN HELA, SIGNAL = 0.63; EXPRESSED IN PLACENTA, SIGNAL = 0.9; EXPRESSED IN HEART, SIGNAL = 1.3; EXPRESSED IN LUNG, SIGNAL = 0.73; SWISSPROT HIT: P55200, EVALUE 6.10e+00
MKPQRGEKAAEEKLEASRVWFMGLKERSQLHNIKVQGEAAHADGEAAASYPEDLRLLR

SEQ ID NO: 33666 - protein, 47 aa, Homo sapiens
  MAP TO AC000396.1; EXPRESSED IN HELA, SIGNAL = 0.47; EXPRESSED IN PLACENTA, SIGNAL = 0.49; SWISSPROT HIT: Q84291, EVALUE 4.80e+00
PVNEVTTPAQPVLEAIVRAALPLKPMCEIRHFGYIITSEPSWTLVKA

SEQ ID NO: 33667 - protein, 56 aa, Homo sapiens
  MAP TO AC016620.5; EXPRESSED IN HELA, SIGNAL = 0.43; EXPRESSED IN LUNG, SIGNAL = 0.85; EXPRESSED IN PLACENTA, SIGNAL = 0.75; SWISSPROT HIT: Q9UKP5, EVALUE 3.00e-29
HGVIATEDEEYFIEPLKNTTEDSKHFSYENGHPHVIYKKSALQQRHLYDHSHCGVS

SEQ ID NO: 33668 - protein, 51 aa, Homo sapiens [sequence omitted]

SEQ ID NO: 33669 - protein, 104 aa, Homo sapiens
  MAP TO AC002471.5; EXPRESSED IN HELA, SIGNAL = 0.6; SWISSPROT HIT: P21359, EVALUE 2.00e-48
MSHVSGGGPIDLSDTDSLQAWINMTSFLCALGGVCLQQRRNSGLATYSPPMGPVSEHKGSMISVMSSEGNADTPVSKYMDQLLSLMVCKLEKVGLQIRTNGKDL

SEQ ID NO: 33670 - protein, 74 aa, Homo sapiens
  MAP TO AL023494.12; EXPRESSED IN HELA, SIGNAL = 0.71; EXPRESSED IN PLACENTA, SIGNAL = 1.3; SWISSPROT HIT: P50622, EVALUE 4.80e+00
CPVRKKRITEAELCAGPNDWILCAHQDVEGHGVNPSVSGLSIPGILDVICEEMDQTTGEPQCEVARRKLQEIED

SEQ ID NO: 33671 - protein, 75 aa, Homo sapiens
  MAP TO AB000381.1; EXPRESSED IN HELA, SIGNAL = 0.59; SWISSPROT HIT: Q99445, EVALUE 7.00e-42
INSRELLVYKNCTNNCTFVYAAEQPPEAPGKIFKTNSFYWVCCCNSMVCNAGGPTNLERDMLPDEVTEEELPEGT

SEQ ID NO: 33672 - protein, 23 aa, Homo sapiens
  MAP TO AC008685.6; EXPRESSED IN LUNG, SIGNAL = 1.1; EXPRESSED IN HELA, SIGNAL = 0.42; EXPRESSED IN PLACENTA, SIGNAL = 0.71
KGTLTSSFAMTVHRTKETGSFIT

SEQ ID NO: 33673 - protein, 91 aa, Homo sapiens
  MAP TO AC008685.6; EXPRESSED IN LUNG, SIGNAL = 1.1; EXPRESSED IN HELA, SIGNAL = 0.42; EXPRESSED IN PLACENTA, SIGNAL = 0.71; SWISSPROT HIT: O60813, EVALUE 2.30e+00
KGYTHQQFCHDSTPNKGDRVIYNLMRPPYCCVQFPLAGTGPHILCLSRLASNLELFKTGKGRGEQKKEEVTCGMLRKGKAPLNKEEEQAMT

SEQ ID NO: 33674 - protein, 69 aa, Homo sapiens
  MAP TO AC004490.1; EXPRESSED IN HELA, SIGNAL = 0.69; SWISSPROT HIT: P30639, EVALUE 5.40e-01
MKLNTRPSTGLLRHILQQVYNHSVTDPEKLNNYEPFSPEVYGETSFDLVAQMIDEIKMTDDDLFVDLGS

SEQ ID NO: 33675 - protein, 59 aa, Homo sapiens
  MAP TO AC004490.1; EXPRESSED IN HELA, SIGNAL = 0.69; SWISSPROT HIT: Q14112, EVALUE 4.20e-01
EGHHAAHEAEHAAVHWTPAPYPAAGLQPLGDRPREAQQLRALLPRGVRGDLLRPGGPDD

SEQ ID NO: 33676 - protein, 43 aa, Homo sapiens
  MAP TO AC004030.1; EXPRESSED IN HELA, SIGNAL = 0.42
ITGSYSVSESPFFSPIHLHSNVAWTVEDPVDSAPPGQRKKEQW

SEQ ID NO: 33677 - protein, 43 aa, Homo sapiens
  MAP TO AC004030.1; EXPRESSED IN HELA, SIGNAL = 0.42
ASRAVTRCLSLPSSAPSTYTQTWRGQWKIQWTVLLPGRERRSN

SEQ ID NO: 33678 - protein, 127 aa, Homo sapiens
  MAP TO AC007883.3; EXPRESSED IN HELA, SIGNAL = 0.44; SWISSPROT HIT: P32656, EVALUE 8.00e-07
GCVWGVAYRLPVGKEEEVKAYLDFREKGGYRTTTVIFYPKDPTTKPFSVLLYIGTCDNPDYLGPAPLEDIAEQIFNAAGPSGRNTEYLFELANSIRNLVPEEADEHLFALEKLVKERLEGKQNLNCI

SEQ ID NO: 33679 - protein, 81 aa, Homo sapiens
  MAP TO AC016629.5; EXPRESSED IN HELA, SIGNAL =  36; SWISSPROT HIT: Q57969, EVALUE 6.50e-01
GGDLGHITVIELLHSLSDLVLVGFNIHSEHKRVVFFYLLHGRLSGQRKLDDSIVAKLVSPGGALPRISGLPPESQCLGPPE

SEQ ID NO: 33680 - protein, 24 aa, Homo sapiens
  MAP TO AC004090.24; EXPRESSED IN HELA, SIGNAL = 0.45
RSLSMSSPLLKPLPPPLPFPSQPP

SEQ ID NO: 33681 - protein, 47 aa, Homo sapiens
  MAP TO AC004144.1; EXPRESSED IN HELA, SIGNAL = 1.4
GTMMWQMAWPSTPSAATSPTAAGQSGPAKSPSRPSWMPRTWIATLPP

SEQ ID NO: 33682 - protein, 73 aa, Homo sapiens
  MAP TO AC004144.1; EXPRESSED IN HELA, SIGNAL = 1.4; SWISSPROT HIT: O87765, EVALUE 2.30e+00
LGDDDVADGLAFHAKRSYQPHGRWAERAGQEPLKTILDAQDLDCYFTPMKPESLENSILDSLEPQSLASLLSE

SEQ ID NO: 33683 - protein, 250 aa, Homo sapiens
  MAP TO AC005587.1; EXPRESSED IN HELA, SIGNAL = 0.37; SWISSPROT HIT: O95047, EVALUE 1.00e-124
SIREFLLLGFPVGPRIQMLLFGLFSLFYVFTLLGNGTILGLISLDSRLHAPMYFFLSHLAVVDIAYACNTVPRMLVNLLHPAKPISFAGRMMQTFLFSTFAVTECLLLVVMSYDLYVAICHPLRYLAIMTWRVCITLAVTSWTTGVLLSLIHLVLLLPLPFCRPQKIYHFFCEILAVLKLACADTHINENMVLAGAISGLVGPLSTIVVSYMCILCAILQIQSREVQRKAFRTCFSHLCVIGLVYGTAII

SEQ ID NO: 33684 - protein, 17 aa, Homo sapiens
  MAP TO AL355075.2; EXPRESSED IN HELA, SIGNAL = 0.26
CTEPPWPVAVSSLGPCS

SEQ ID NO: 33685 - protein, 472 aa, Homo sapiens
  MAP TO AL136096.2; EXPRESSED IN HELA, SIGNAL = 0.22; SWISSPROT HIT: P21554, EVALUE 0.00e+00
MKSILDGLADTTFRTITTDLLYVGSNDIQYEDIKGDMASKLGYFPQKFPLTSFRGSPFQEKMTAGDNPQLVPADQVNITEFYNKSLSSFKENEENIQCGENFMDIECFMVLNPSQQLAIAVLSLTLGTFTVLENLLVLCVILHSRSLRCRPSYHFIGSLAVADLLGSVIFVYSFIDFHVFHRKDSRNVFLFKLGGVTASFTASVGSLFLTAIDRYISIHRPLAYKRIVTRPKAVVAFCLMWTIAIVIAVLPLLGWNCEKLQSVCSDIFPHIDETYLMFWIGVTSVLLLFIVYAYMYILWKAHSHAVRMIQRGTQKSIIIHTSEDGKVQVTRPDQARMDIRLAKTLVLILVVLIICWGPLLAIMVYDVFGKMNKLIKTVFAFCSMLCLLNSTVNPIIYALRSKDLRHAFRSMFPSCEGTAQPLDNSMGDSDCLHKHANNAASVHRAAESCIKSTVKIAKVTMSVSTDTSAEAL

SEQ ID NO: 33686 - protein, 980 aa, Homo sapiens
  MAP TO AL137853.3; EXPRESSED IN HELA, SIGNAL = 0.84; SWISSPROT HIT: Q02910, EVALUE 2.00e-03
EDILGEVANRTAQGLEGLVSDSACTVGTIDAEQLSDTDSVQMFLELEKECLCEEGVTPLVELQNQISSEGLAASQDAENLLVISHFSGAALEKEQHLGLLHVRAKDYDTRLDCGYFNTLDSSQVPNAVELIAHVDIMRDTSTVSKEECEKVPFSPRTAEFKSRQPADLDSLEKLDPGGLLNSDHRVSHEEKLSGFIASELAKDNGSLSQGDCSQTEGNGEECIERVTFSFAFNHELTDVTSGPEVEVLYESNLLTDEIHLESGNVTVNQENNSLTSMGNVVTCELSVEKVCDEDGEAKELDYQATLLEDQAPAHFHRNFPEQVFQDLQRKSPESEILSLHLLVEELRLNPDGVETVNDTKPELNVASSEGGEMERRDSDSFLNIFPEKQVTKAGNTEPVLEEWIPVLQRPSRTAAVPTVKDALDAALPSPEEGTSIAAVPAPEGTAVVAALVPFPHEDILVASIVSLEEEDVTAAAVSAPERATVPAVTVSVPEGTAAVAAVSSPEETAPAVAAAITQEGMSAVAGFSPEWAALAITVPITEEDGTPEGPVTPATTVHAPEEPDTAAVRVSTPEEPASPAAAVPTPEEPTSPAAAVPTPEEPTSPAAAVPPPEEPTSPAAAVPTPEEPTSPAAAVPTPEEPTSPAAAVPTPEEPTSPAAAVPTPEEPTSPAAAVPTPEEPTSPAAAVPTPEEPASPAAAVPTPEEPASPAAAVPTPEEPAFPAPAVPTPEESASAAVAVPTPEESASPAAAVPTPAESASFAAVVATLEEPTSPAASVPTPAAMVATLEEFTSPAASVPTSEEPASLAAAVSNPEEPTSPAAAVPTLEEPTSSAAAVLTPEELSSPAASVPTPEEPASPAAAVSNLEEPASPAAAVPTPEVAAIPAASVPTPEVPAIPAAAVPPMEEVSPIGVPFLGVSAHTDSVPISEEGTPVLEEASSTGMWIKEDLDSLVFGIKEVTSTVLHGKVPLAATAGLNSDE

SEQ ID NO: 33687 - protein, 55 aa, Homo sapiens
  MAP TO AL137853.3; EXPRESSED IN HELA, SIGNAL = 0.84
GLLATYLLVRFVALMTHSQPRTSWLLFPRIYPWIAIVFLQVRIFSVRWQTELLRG

SEQ ID NO: 33688 - protein, 92 aa, Homo sapiens
  MAP TO AC005343.1; EXPRESSED IN HELA, SIGNAL = 0.66; SWISSPROT HIT: P27898, EVALUE 2.70e-01
LQPERSVSAARRRFQSTYSQCGARLSRWKATSSDLRRSVCWARTTRRSPSPSAAPWWDWASSFSSPTLSAGRGVTRTAAGTELLGSLFIPLG

SEQ ID NO: 33689 - protein, 164 aa, Homo sapiens
  MAP TO AL121656.1; EXPRESSED IN HELA, SIGNAL = 0.34; SWISSPROT HIT: Q00918, EVALUE 4.00e-13
MAGAWLRWGLLLWAGLLASSAHGRLRRITYVVHPGPGLAAGALPLSGPPRSRTFNVALNARYSRSSAAAGAPSRASPGVPSERTRRTSKPGGAALQGLRPPPPPPPEPARPAVPGGQLHPNPGGHPAAAPFTKQGRQVVRSKVPQETQSGGGSRLQVHQKQQLQ

SEQ ID NO: 33690 - protein, 19 aa, Homo sapiens
  MAP TO AL121656.1; EXPRESSED IN HELA, SIGNAL = 0.34
GGSPTWCTRAPAWQPAPCP

SEQ ID NO: 33691 - protein, 65 aa, Homo sapiens
  MAP TO AP000553.1; EXPRESSED IN HELA, SIGNAL = 0.53; SWISSPROT HIT: Q64198, EVALUE 2.70e+00
PRGTPCCGIRWVARPAFSGHRSSPCPGSQGCWAQALACLKHQSRGLENRSQSSASESSIRRSSHY

SEQ ID NO: 33692 - protein, 168 aa, Homo sapiens
  MAP TO AL035530.11; EXPRESSED IN HELA, SIGNAL = 0.28; SWISSPROT HIT: P45386, EVALUE 1.10e+00
VSTLQNDSAYDSNDPDVESNSSSGISSPSRQPQVPMATAAGLDSAGPQDAREVSPEPIVSTVARLKSSLAQPDRRYSEPSMPSSQECLESRVTNQTLTKSEGDFPVPRVGSRLESEEAEDPFPEEVFPAVQGKTKRPVDLKIKNLAPGSVLPRALVLKAFSSSSLDAS

SEQ ID NO: 33693 - protein, 159 aa, Homo sapiens
  MAP TO AC010209.13; EXPRESSED IN HELA, SIGNAL = 1.6; SWISSPROT HIT: O43903, EVALUE 7.00e-11
MLHGKHVMVRVGGGWDTLQGFLLKYDPCRILQFATLEQKILAFQKGVSNESVPDSPARTPQPPEMNPLSAVNMFQKQNSKPSVPVSIPKSKEKQGRPPGALVPASSLKGGNLGSMSVRSKLPNSPAASSHPKLKSSKGITKKPQAPSNNASSSLASLNP

SEQ ID NO: 33694 - protein, 25 aa, Homo sapiens
  MAP TO AC010209.13; EXPRESSED IN HELA, SIGNAL = 1.6
DADSGDKKPTAKKKEDDDHYFVMTG

SEQ ID NO: 33695 - protein, 35 aa, Homo sapiens
  MAP TO AC010209.13; EXPRESSED IN HELA, SIGNAL = 1.6
CFMENMSWFALVEAGILFKDFCLNMTPVEYYSLPH

SEQ ID NO: 33696 - protein, 234 aa, Homo sapiens
  MAP TO AC005390.1; EXPRESSED IN HELA, SIGNAL = 0.54; SWISSPROT HIT: P70402, EVALUE 7.00e-03
MENNQWGRNPRSRSIRQPITATAQPSSQSQPPLNPVANHSHRSTQQPITATPRDSSTPAPRKKPTTTSAAEDAGQWPGNHPAAPQKRRMGSNNPAAALPRAIRRTHSSQKPEPTAQEWTHSPQDPQLKGGLTAHRTHSSWVDPQLIGAWTHSSWVDPQPIGPTAHGWTHSSRVDSQLTGGLTAHRWTHSSQDLQLTGGLTAHRHLDPQLTGGLTAHRTYSSRVDPQLPGGPSAP

SEQ ID NO: 33697 - protein, 35 aa, Homo sapiens
  MAP TO AC005390.1; EXPRESSED IN HELA, SIGNAL = 0.54
WKTTNGEETHGAAQSGSQSQPPLNLAANHSHRSTQ

SEQ ID NO: 33698 - protein, 418 aa, Homo sapiens
  MAP TO AC006162.1; EXPRESSED IN HELA, SIGNAL = 1.7; EXPRESSED IN LUNG, SIGNAL = 1.1; SWISSPROT HIT: P51523, EVALUE 1.00e-40
GKKKELREQHPSLRDEGTSDDKVFLACRGAGQCPLSAPAGTMDRTRVLQASQAGPPFFCYTCGKCFSRRSYLYSHQFVHNPKLTNSCSQCGKLFRSPKSLSYHRRMHLGERPFCCTLCDKTYCDASGLSRHRRVHLGYRPHSCSVCGKSFRDQSELKRHQKIHQNQEPVDGNQECTLRIPGTQAEFQTPIARSQRSIQGLLDVNHAPVARSQEPIFRTEGPMAQNQASVLKNQAPVTRTQAPITGTLCQDARSNSHPVKPSRLNVFCCPHCSLTFSKKSYLSRHQKAHLTEPPNYCFHCSKSFSSFSRLVRHQQTHWKQKSYLCPICDLSFGEKEGLMDHWRGYKGKDLCQSSHHKCRVILGQWLGFSHDVPTMAGEEWKHGGDQSPPRIHTPRRRGLREKACKGDKTKEAVSILKHK

SEQ ID NO: 33699 - protein, 82 aa, Homo sapiens
  MAP TO AC006162.1; EXPRESSED IN HELA, SIGNAL = 1.7; EXPRESSED IN LUNG, SIGNAL = 1.1; SWISSPROT HIT: P75866, EVALUE 1.60e-01
RNPISPDTRRPTSQSRPTTASIAASLSAHFPGWSDTSRPTGSRRATFALSVTSPLGRKRALWITGGAIKARTCARAATINAG

SEQ ID NO: 33700 - protein, 28 aa, Homo sapiens
  MAP TO AL079302.4; EXPRESSED IN HELA, SIGNAL = 0.25; SWISSPROT HIT: Q61083, EVALUE 8.70e+00
SARCPSLELPATSRAYPLHGKPRAVAPW

SEQ ID NO: 33701 - protein, 321 aa, Homo sapiens
  MAP TO AL079302.4; EXPRESSED IN HELA, SIGNAL = 0.25; SWISSPROT HIT: P04051, EVALUE 3.20e-01
VSSVPFLGAAGHQQSLPSSWKASCSGPLVMASDSDVKMLLNFVNLASSDIKAALDKSAPCRRSVDHRKYLQKQLKRFSQKYSRLPRGLPGRAAEPYLKRGSEDRPRRLLLDLGPDSSPGGGGGCKEKVLRNPYREECLAKEQLPQRQHPEAAQPGQVPMRKRQLPASFWEEPRPTHSYHVGLEGGLGPREGPPYEGKKNCKGLEPLGPETTLVSMSPRALAEKEPLKMPGVSLVGRVNAWSCCPFQYHGQPIYPGPLGALPQSPVPSLGLWRKSPAFPGELAHLCKDVDGLGQKVCRPVVLKPIPTKPAVPPPIFNVFGYL

SEQ ID NO: 33702 - protein, 187 aa, Homo sapiens
  MAP TO AC021287.4; EXPRESSED IN HELA, SIGNAL = 0.68; SWISSPROT HIT: P48997, EVALUE 5.80e-01
MPDSQRGRVAEELILREKVEAVQPGPVVELQLSLSQERHKGASGPLVALPGAEKSKSPDPDPNLSHDRIVHINSIPTNEKADPFLRSSKIIQISSGRELRVIQESEAGDAGLPRVEVILDCSDRQKTEGCRLQAGKECVDSPVEGGQSEAPPSLVSFAVSSEGTEQGEDPRSEKDHSRPHKHRARHA

SEQ ID NO: 33703 - protein, 25 aa, Homo sapiens
  MAP TO AC021287.4; EXPRESSED IN HELA, SIGNAL = 0.68
RHRAGRRSTLGKRSQQTSQAPSAAC

SEQ ID NO: 33704 - protein, 202 aa, Homo sapiens
  MAP TO AC011298.2; EXPRESSED IN HELA, SIGNAL = 0.83; SWISSPROT HIT: P34224, EVALUE 1.20e+00
MAGLNVSLSFFFATFTLCEAARRASKALLPVGAYEVFAREAVGAVQLGACFLEMRTLVELGPWAGDFGPDLLLTLLFLLFLAHGVTLDGASANPTVSLQEFLMAEESLPGTLLKLAAQGLGMQAACTLTRLCWAWELSDLHLLQSLMAQSCSSALRTSVPHGALVEAACAFCFHLTLLHLRHSPPAYSGLRCGSVGHRHGLH

SEQ ID NO: 33705 - protein, 66 aa, Homo sapiens
  MAP TO AC011298.2; EXPRESSED IN HELA, SIGNAL = 0.83
VSCRHSISGGPGRWQVLTCPSPSSLPPSPSVRQPGGPPRPCSQWAPMKSSPGRRWARCSSGPASWR

SEQ ID NO: 33706 - protein, 255 aa, Homo sapiens
  MAP TO AL022319.2; EXPRESSED IN HELA, SIGNAL = 1.9; SWISSPROT HIT: Q9Z0Y8, EVALUE 1.00e-21
FPYLQNGKMALTCCTFLKGSEVAGGDVTSGWMCPHVPVDVDGVRWDRERSSRVKPIPSPAGQVGGLRATAGVQAAFGHLVPQPWVCLWGADPNGNSFQSSSRSSYYGPWGRSAAWASRRSSWNSLKHKPPSAEHESLLSAERGGGARVCEVAADEGPPRAAPLHTPHAHHIHHGPHLAHRHRHHRRTLSLDNRDSVDLAELVPAVGAHPRAAWRAAGPAPGHEDCNGRMPSIAKDVFTKMGDRGDRGEDEEEIDY

SEQ ID NO: 33707 - protein, 385 aa, Homo sapiens
  MAP TO U80017.1; EXPRESSED IN HELA, SIGNAL = 0.91; SWISSPROT HIT: Q13075, EVALUE 0.00e+00
FNDDDLAEAGVDEDEDLTMCLMSKFTAQRLRPFYRFLSPAFQEFLAGMRLIELLDSDRQEHQDLGLYHLKQINSPMMTVSAYNNFLNYVSSLPSTKAGPKIVSHLLHLVDNKESLENISENDDYLKHQPEISLQMQLLRGLWQICPQAYFSMVSEHLLVLALKTAYQSNTVAACSPFVLQFLQGRTLTLGALNLQYFFDHPESLSLLRSIHFPIRGNKTSPRAHFSVLETCFDKSQVPTIDQDYASAFEPMNEWERNLAEKEDNVKSYMDMQRRASPDLSTGYWKLSPKQYKIPCLEVDVNDIDVVGQDMLEILMTVFSASQRIELHLNHSRGFIESIRPALELSKASVTKCSISKLELSAAEQELLLTLPSLESLEVSGTIQSQ

SEQ ID NO: 33708 - protein, 111 aa, Homo sapiens
  MAP TO AC010271.5; EXPRESSED IN HELA, SIGNAL = 0.64
GIMVGGLKRKHSDLEEEEERWEWSPAGLQSYQQALLRISLDKVQRSLGPRAPSLRRHVLIHNTLQQLQAALRLAPAPALPPRAPLPGRGGFLPVSHHWLYPQGAGHLHGWD

SEQ ID NO: 33709 - protein, 142 aa, Homo sapiens
  MAP TO AC010271.5; EXPRESSED IN HELA, SIGNAL = 0.64
MSSSITPSNSCRLHFAWLPPLPCPPEPLFLGEEDFSLSATIGSILRELDTSMDGTEPPQNPVTPLGLQNEVPPQPDPVFLEALSSRYLGDSGLDDFFLDIDTSAVEKEPARAPPEPPHNLFCAPGSWEWNELDHIMEIILGS

SEQ ID NO: 33710 - protein, 224 aa, Homo sapiens
  MAP TO AP000517.1; EXPRESSED IN HELA, SIGNAL = 0.96; SWISSPROT HIT: Q02084, EVALUE 4.00e-14
SVTLDPQSASGYLQLSEDWKCVTYTSLYKSAYLHPQQFDCEPGVLGSKGFTWGKVYWEVEVEREGWSEDEEEGDEEEEGEEEEEEEEAGYGDGYDDWETDEDEESLGDEEEEEEEEEEEVLESCMVGVARDSVKRKGDLSLRPEDGVWALRLSSSGIWANTSPEAELFPALRPRRVGIALDYEGGTVTFTNAESQELIYTFTATFTRRLVPFLWLKWPGTRLLL

SEQ ID NO: 33711 - protein, 30 aa, Homo sapiens
  MAP TO AP000517.1; EXPRESSED IN HELA, SIGNAL = 0.96
GQWVPAAVRGLEVRDLHQPVQECLPAPPAV

SEQ ID NO: 33712 - protein, 253 aa, Homo sapiens
  MAP TO AP001067.1; EXPRESSED IN HELA, SIGNAL = 0.84; SWISSPROT HIT: P15714, EVALUE 3.20e-01
MKAQHCWLEVQWLWAEETQTGLRAARIFGSQRWPWNNSGETGPARQQLDFWPEERPQHAEERREHVGRQRRDTQEAGRQQLGWQVEAGAQQEGMGTQQVDLHTGRQRRDTEEEGLQQEVVQQAGWRLDCWQHEEEAPEQTGTQQMGLQQTGLQQTGTQQTGLQQTGTQQACWQGEDVQQAGWQLDCWQHEGVQELVQPDWQGLGSQAAWQQGLDTQLTGVQTRVRQGAGAQQLVAQQGGSQQLSGQASTCQES

SEQ ID NO: 33713 - protein, 251 aa, Homo sapiens
  MAP TO AL033539.17; EXPRESSED IN HELA, SIGNAL =   1; SWISSPROT HIT: P51858, EVALUE 2.00e-53
MSAYGMPMYKSGDLVFAKLKGYAHWPARIEHMTQPNRYQVFFFGTHETAFLSPKRLFPYKECKEKFGKPNKRRGFSAGLWEIENNPTVQASDCPLASEKGSGDGPWPEPEAAEGDEDKPTHAGGGGDELGKPDDDKPTEEEKGPLKRSAGDPPEDAPKRPKEAAPDQEEEAEAERAAEAERAAAAAAATAVDEESPFLVAVENGSAPSEPGLVCEPPQPEEEELREEEVADEEASQEWHAEAPGGGDRDSL

SEQ ID NO: 33714 - protein, 189 aa, Homo sapiens
  MAP TO AC004201.1; EXPRESSED IN HELA, SIGNAL = 1.2; EXPRESSED IN LUNG, SIGNAL =   1; SWISSPROT HIT: P14373, EVALUE 3.00e-10
MWWRDLTRLRLWLKREAIPGEGRKAAKVNAGVGEKGIYTASSRGGPPSARSKAVTVVAEGAASRSWLSMDAPELGPGLVERLEQLATCPLCGGSFEDPVLLACEHSFCRACLARRWGTPPATGTEASPTACPCCGLPCPRRSLRSNVRLAVEVRISRELREKLAEPGARAGRRRGGRIPTMGCLDLPGE

SEQ ID NO: 33715 - protein, 27 aa, Homo sapiens
  MAP TO AC004201.1; EXPRESSED IN HELA, SIGNAL = 1.2; EXPRESSED IN LUNG, SIGNAL =   1
VVERFDETETLVEERGNPRRGAESGKS

SEQ ID NO: 33716 - protein, 878 aa, Homo sapiens
  MAP TO AP000557.1; EXPRESSED IN HELA, SIGNAL = 0.56; SWISSPROT HIT: P19706, EVALUE 8.00e-03
SRSLDSTRSLPKASKSEERPSSPDTSTPGSRRLSPPPSPLPPPPPPSAHRKLSNPRGGEGSESQPCEVLTPSPPGLGHHELIKLNWLLAKALWVLARRCYTLQEENKQLRRAGCPYQADEKVKRLKVKRAELTGLARRLADRARELQETNLRAVSAPIPGESCAGLELCQVFARQRARDLSEQASAPLAKDKQIEELRQECHLLQARVASGPCSDLHTGRGGPCTQWLNVRDLDRLQRESQREVLRLQRQLMLQQGNGGAWPEAGGQSATCEEVRRQMLALERELDQRRRECQELGTQAAPARRRGEEAETQLQAALLKNAWLAEENGRLQAKTDWVRKVEAENSEVRGHLGRACQERDASGLIAEQLLQQAARGQDRQQQLQRDPQKALCDLHPSWKEIQALQCRPGHPPEQPWETSQMPESQVKGSRRPKFHARPEDYAVSQPNRDIQEKREASLEESPVALGESASVPQVSETVPASQPLSKKTSSQSNSSSEGSMWATVPSSPTLDRDTASEVDDLEPDSVSLALEMGGSAAPAAPKLKIFMAQYNYNPFEGPNDHPEGELPLTAGDYIYIFGDMDEDGFYEGELDDGRRGLVPSNFVEQIPDSYIPGCLPAKSPDLGPSQLPAGQDEALEEDSLLSGKAQGMVDRGLCQMVRVGSKTEVATEILDTKTEACQLGLLQSMGKQGLSRPLLGTKGVLRMAPMQLHLQNVTATSANITWVYSSHRHPHVVYLDDREHALTPAGVSCYTFQGLCPGTHYRVRVEVRLPWDLLQVYWGTMSSTVTFDTLLAGPPYPPLDVLVERHASPGVLVVSWLPVTIDSAGSSNGVQVTGYAVYADGLKVCEVADATAGSTVLEFSQLQVPLTWQKVSVRTMSLC

SEQ ID NO: 33717 - protein, 202 aa, Homo sapiens
  MAP TO AC004908.1; EXPRESSED IN HELA, SIGNAL =   1; SWISSPROT HIT: P52742, EVALUE 8.00e-75
GDKPYGCLLCGKAFSKCSYLRQHERTHNGEKPYECHLCGKAFSHCSHLRQHERSHNGEKPHGCHLCGKAFTESSVLKRHERIHTGEKPYECHVCGKAFTESSDLRRHERTHTGEKPYECHLCGKAFNHSSVLRRHERTHTGEKPYECNICGKAFNRSYNFRLHRRVHTGEKPYVCPLCGKAFSKFFNLRQHERTHTKKAMNM

SEQ ID NO: 33718 - protein, 156 aa, Homo sapiens
  MAP TO AC003108.1; EXPRESSED IN LUNG, SIGNAL = 1.3; EXPRESSED IN HELA, SIGNAL = 1.3; SWISSPROT HIT: O43303, EVALUE 7.00e-88
LTSDERGAHIMNSTCAAMPKLHEPYASSQCIASPNFGTVSGLKPASMLEKNCSLQTELNKSYDVKNPSPLLMQNQNTRQQMDTPMVSCGNEQFLDNSFEKVKRRLDLDIDGLQKENCPYVITSGITEQERQHLPEKRYPKGSGFVNKNKMLGTSSK

SEQ ID NO: 33719 - protein, 64 aa, Homo sapiens
  MAP TO AP000884.1; EXPRESSED IN LUNG, SIGNAL =   1; EXPRESSED IN PLACENTA, SIGNAL = 1.4; EXPRESSED IN HELA, SIGNAL = 0.73; SWISSPROT HIT: P75258, EVALUE 2.10e+00
AKSTKQTPSNEEDSSACPAKEKCCSQLSFLTYVDGWVVEISDDYIGCPAHRNQNEDARQDEEDS

SEQ ID NO: 33720 - protein, 198 aa, Homo sapiens
  MAP TO AL121985.13; EXPRESSED IN PLACENTA, SIGNAL = 3.7; EXPRESSED IN HELA, SIGNAL = 3.5; EXPRESSED IN LUNG, SIGNAL = 3.7; SWISSPROT HIT: P10267, EVALUE 1.00e-85
IMGLIAVTATAAVAGVALHSSVQSVNFVNYWQKNSTRLWNSQSSIDQKLASQINDLRQTVIWMGDRLMTLEHHFQLQCDWNTSDFCITPQIYNESEHHWDMVRRHLQGREDNLTLDISKLKEQIFEASKAHLNLVPGTEAIAGVADGLANLNPVTWIKTIRSTMIINLILIIVCLFCLLLVCRCTQQLRRDSDIENGP

SEQ ID NO: 33721 - protein, 86 aa, Homo sapiens
  MAP TO AC008456.4; EXPRESSED IN HELA, SIGNAL = 0.88; SWISSPROT HIT: O35832, EVALUE 1.10e+00
GPTWPPQTRMREMMHLCAVEVTPLMTVATGAACGTRATSWSLGQALPWRRHWRPQPQTWPGLSSVTRLRALMRPPWCTLPMPTASH

SEQ ID NO: 33722 - protein, 259 aa, Homo sapiens
  MAP TO AC008456.4; EXPRESSED IN HELA, SIGNAL = 0.88; SWISSPROT HIT: O94823, EVALUE 1.00e-99
WDDQKIVENDHCQCLEFQGWRKISGFTYCKSTFIFRIRQLGIISNIESNIPLSFFGHKVTIKPSSKALGTSLEKIQQLFQKLKLLSLSQSFSSTAPSDTDLGESLGANVATTDSDERDDASVCSGGDSTDDGGYRSSMWDQGDILESGSGTSLEEALEAPATDLARPEFCYEAESPDEAALVHAAHAYSFTLVSRTPEQVTVRLPQGTCLTFSLLCTLGFDSVRKRMSVVVRHPLTGEIVVYTKGADSVIMDLLEDPAC

SEQ ID NO: 33723 - protein, 40 aa, Homo sapiens
  MAP TO AL162261.1; EXPRESSED IN HELA, SIGNAL = 2.8
MFHRLDSHPWERIRLFHRVVLEEVEAGRRGWSDGFEDLRH

SEQ ID NO: 33724 - protein, 59 aa, Homo sapiens
  MAP TO AL162261.1; EXPRESSED IN HELA, SIGNAL = 2.8
DYLDLRKERIVYLFLEHWRRWAFRGPGRRAQARLGRLLPGVTAARAGRSWRPRTPPGYR

SEQ ID NO: 33725 - protein, 19 aa, Homo sapiens
  MAP TO AF186997.2; EXPRESSED IN HELA, SIGNAL = 1.7
MVGLHNLEPRGERNIAFHP

SEQ ID NO: 33726 - protein, 109 aa, Homo sapiens
  MAP TO AF186997.2; EXPRESSED IN HELA, SIGNAL = 1.7; SWISSPROT HIT: P10636, EVALUE 7.00e-02
AAISSDGLSCGSGSGSGASSPFVPHLESDYCSLMKEPAPEKQQDPGCPGVTPSRCLGLTGEPQPPAHPREATQPEPIYAESTKRKKAAPVPSKSQAKIEHAAAAQGQGQ

SEQ ID NO: 33727 - protein, 341 aa, Homo sapiens
  MAP TO AC012122.1; EXPRESSED IN HELA, SIGNAL = 1.5; SWISSPROT HIT: Q15427, EVALUE 3.00e-03
DLLVSTVYQDIKVATPGPASKRSPCERSVARPAEPAPFNKRHCPSFDFLEALDRPTTETLPEPPPPEPAVPRARTREAEPRRRARSKSAPPGLTPAPALPPVLPRRGREAQRAARAEASPRPCQLAASHQVAAAAGWPGPHRAMCAAAGRRALPEPPAGPYPYVRSFRTSSQTTQCSSTPHGAHGHAGPPRQRHGPAPAPQFHGLTVPGPRHMALSHTPTPSDSYCADPRAFYCDGPLHGPRDYAKRRSLPFITPPGPTQFFYTEEPQGFRGSFAASPGPTFDAYCPRPYPSEELPGPSPRCMGGYYAGEVGTFPIQEPSSRSYYGEAPRAYGLPYGPRYV

SEQ ID NO: 33728 - protein, 244 aa, Homo sapiens
  MAP TO AL136450.1; EXPRESSED IN HELA, SIGNAL = 0.8; EXPRESSED IN LUNG, SIGNAL = 0.95; SWISSPROT HIT: Q01814, EVALUE 6.50e-01
MDYAGNVAEAEGLLVPLSSPGDGLKLPASDSAEASNSRADCSWTPLNTQMSKQVDCSPAGVKALDSRQGVGEKNTFILATLGTGVPVEGTLPLVTTNFSPLPAPICPPAPGSASVPHSVPDAFQVPLSVPAPVPHSGLVPVQVATSVPAPSPPLAPVPALAPAPPSVPTLISDSNPLSVSASVLVPVPASAPPSGPVPLSAPAPAPLSVPVSAPPLALIQAPVPPSAPTLVLAPVPTPVLAPMP

SEQ ID NO: 33729 - protein, 183 aa, Homo sapiens
  MAP TO AL138846.2; EXPRESSED IN HELA, SIGNAL = 0.65; SWISSPROT HIT: O35052, EVALUE 4.10e+00
MARRRRRACIALFLVLLFAFGTLMGLRTLKAPDGLPALGPGLELAPFERRPEGAPAPAARAPAAPAAPPPPPPPPRTADPGGSPGPAPAEAEPAPVQSLRVYSDLHAFYYSWYGSPRREGHYIHWDHVMVPHWDPKISASYPRGRHSPPDDLGSSFYPELGPYSSRDPEVLREHMTQLKEAAI

SEQ ID NO: 33730 - protein, 77 aa, Homo sapiens
  MAP TO AL138846.2; EXPRESSED IN HELA, SIGNAL = 0.65
ACASTRTCTPSTTRGTGARGARATTFTGTTSWCRTGTPRSRPATPAAATAPQTTWAPASTRSWGPTAPGTPKCCGSI

SEQ ID NO: 33731 - protein, 250 aa, Homo sapiens
  MAP TO AL035587.5; EXPRESSED IN HELA, SIGNAL = 0.41; SWISSPROT HIT: P10266, EVALUE 1.00e-123
LPHSTIKTFTLYLDQMATLIGQARLRIIKLCESDSDKIIVPLNKEQVRQAFINSGAWQIGLADFVGIIDNHYPKTKIFQFLKLTTWILPKITRHKPLENALTVFTDGSSNGKAAYTRPKERLIETQYHWAQRAELVAVITVLQDFNQPINIVSDSAYVVQATKDVETALIKYSIDDQLNQLFNMLQQTVRKRNFPFYVTHIRAHTNLPEPLTKANEQVDLLVSSAFLEAQELHALTHVNATGLKNKFDIT

SEQ ID NO: 33732 - protein, 98 aa, Homo sapiens
  MAP TO AC011904.3; EXPRESSED IN HELA, SIGNAL = 0.63; SWISSPROT HIT: Q53046, EVALUE 3.20e+00
CVAGSCGGCWRRRAGAPPPWGASCFPCSWDSALCCWLPVGLESMVMSRVNSCVTPSSRAARLPASMPSTPSPRCVSGSSRSSWWLYPAPSIWVSLCIT

SEQ ID NO: 33733 - protein, 260 aa, Homo sapiens
  MAP TO AC011904.3; EXPRESSED IN HELA, SIGNAL = 0.63; SWISSPROT HIT: P51915, EVALUE 4.00e-28
MCGRFLRRLLAEESRRSTPVGRLLLPVLLGFRLVLLAASGPGVYGDEQSEFVCHTQQPGCKAACFDAFHPLSPLRFWVFQVILVAVPSALYMGFTLYHVIWHWELSGKGKEEETLIQGREGNTDVPGAGSLRLLWAYVAQLGARLVLEGAALGLQYHLYGFQMPSSFACRREPCLGSITCNLSRPSEKTIFLKTMFGVSGFCLLFTFLELVLLGLGRWWRTWKHKSSSSKYFLTSESTRRHKKATDSLPVVETKEQFQEA

SEQ ID NO: 33734 - protein, 81 aa, Homo sapiens
  MAP TO U58675.1; EXPRESSED IN HELA, SIGNAL = 0.5; SWISSPROT HIT: P94965, EVALUE 2.90e+00
NSCSQNLGPMEQSLLSSSCWACWRRQGCSQLSLCSSSLPTWSRSGATSASWQLSWWSPNSTPPCTSSWGTYQCWMLGASAS

SEQ ID NO: 33735 - protein, 18 aa, Homo sapiens
  MAP TO U58675.1; EXPRESSED IN HELA, SIGNAL = 0.5
WPMTNSWPSAGPSPTAPA

SEQ ID NO: 33736 - protein, 317 aa, Homo sapiens
  MAP TO U58675.1; EXPRESSED IN HELA, SIGNAL = 0.5; SWISSPROT HIT: P47881, EVALUE 0.00e+00
ELMQPESGANGTVIAEFILLGLLEAPGLQPVVFVLFLFAYLVTVRGNLSILAAVLVEPKLHTPMYFFLGNLSVLDVGCISVTVPSMLSRLLSRKRAVPCGACLTQLFFFHLFVGVDCFLLTAMAYDQFLAICRPLTYSTRMSQTVQRMLVAASWACAFTNALTHTVAMSTLNFCGPNVINHFYCDLPQLFQLSCSSTQLNELLLFAVGFIMAGTPMALIVISYIHVAAAVLRIRSVEGRKKAFSTCGSHLTVVAIFYGSGIFNYMRLGSTKLSDKDKAVGIFNTVINPMLNPIIYSFRNPDVQSAIWRMLTGRRSLA

SEQ ID NO: 33737 - protein, 162 aa, Homo sapiens
  MAP TO AL121760.1; EXPRESSED IN HELA, SIGNAL = 0.77; SWISSPROT HIT: P32583, EVALUE 8.00e-10
YRNKATAKSDSEDSKYRNKATAKSDSEDSKYRNKATAKSDSEDNKYRNKATAKSDSEDSKYRNKATAKSDSEDNKYRNKATAKSDSEDNKYRNKATAKSDSEDNKYRNKATAKSDSEDNKYRNKATAKSDSEDNKYRNKATAKSDSVEEPVRVVREHFSEEV

SEQ ID NO: 33738 - protein, 129 aa, Homo sapiens
  MAP TO AL136307.12; EXPRESSED IN PLACENTA, SIGNAL = 2.5; EXPRESSED IN HELA, SIGNAL =  17; SWISSPROT HIT: P14618, EVALUE 2.00e-53
MADTFLEHMCCLDTDSPPITAWSTGIICTMGPASPLLEMLKKTIKSGINVAHLNSHGAHEYHTETIKNVRTATESFASDSILYQPIAVAPDTKGPEIPTGPVKGSGTAEVELKKGATLKFTLDNTYMEK

SEQ ID NO: 33739 - protein, 181 aa, Homo sapiens
  MAP TO AL163302.2; EXPRESSED IN HELA, SIGNAL = 1.3; EXPRESSED IN LUNG, SIGNAL =   2; SWISSPROT HIT: P39060, EVALUE 5.00e-85
RISEEVGLLQLLGDPPPQQVTQTDDPDVGLAYVFGPDANSGQVARYHFPSLFFRDFSLLFHIRPATEGPGVLFAITDSAQAMVLLGVKLSGVQDGHQDISLLYTEPGAGQTHTAASFRLPAFVGQWTHLALSVAGGFVALYVDCEEFQRMPLARSSRGLELEPGAGLFVAQAGGADPDKFQ

SEQ ID NO: 33740 - protein, 87 aa, Homo sapiens
  MAP TO AL163302.2; EXPRESSED IN HELA, SIGNAL = 1.3; EXPRESSED IN LUNG, SIGNAL =   2
SASARRWGCCSSLGTPRPSRSPRRMTPTSGWPTSLGQMPTVAKWPGTTSPASSSVTSHCCSTSGQPQRAQGCCSPSRTRRRPWSCWA

SEQ ID NO: 33741 - protein, 288 aa, Homo sapiens
  MAP TO AC002504.1; EXPRESSED IN HELA, SIGNAL = 1.9; SWISSPROT HIT: O35085, EVALUE 3.00e-63
SSSAPFEAELHLPPKLRRLYGPGGGRLLQGAAAAAAAAAAAAAAAATATAGPRGEAPPPPPPTARPGERPDGAGAAAAAAAAAAAAWDTLKISQAPQVSISRSKSYRENGAPFVPPPPALDELGGPGGVTHPEERLGVAGGPGSAPAAGGGTGTEDDEEELLEDEEDEDEEEELLEDDEEELLEDDARALLKEPRRCPVAATGAVAAAAAAAVATEGGELSPKEELLLHPEDAEGKDGEDSVCLSAGSDSEEGLLKRKQRRYRTTFTSYQLEELERAFQKTHYPDVFT

SEQ ID NO: 33742 - protein, 96 aa, Homo sapiens
  MAP TO AC002504.1; EXPRESSED IN HELA, SIGNAL = 1.9
AAPRSRPSCTCRPSCGACTARAGAASFRVRQRRRRRRRRRRQRPPRPRRVHAGRPLRRHRQPRGPGNGRTAQGPPRQPRPRPPRPGTRSRSARRRR

SEQ ID NO: 33743 - protein, 396 aa, Homo sapiens
  MAP TO AC018725.1; EXPRESSED IN HELA, SIGNAL = 0.6; SWISSPROT HIT: Q9UIE0, EVALUE 0.00e+00
GKTIAEAGPHEDCPCQQIWEQTASDLTQSQDSIINNSHFFEQGDVPSQVEAGLSIIHTGQKPSQNGKCKQSFSDVAIFDPPQQFHSGEKSHTCNECGKSFCYISALRIHQRVHLREKLSKCDMRGKEFSQSSCLQTRERVHTGEKPFKCEQCGKGFRCRAILQVHCKLHTGEKPYICEKCGRAFIHDFQLQKHQIIHTGEKPFKCEICGKSFCLRSSLNRHCMVHTAEKLYKSEECGKGFTDSLDLHKHQIIHTGQKPYNCKECGKSFRWSSYLLIHQRIHSGEKPYRCEECGKGYISKSGLNLHQRVHTGERPYNCKECGKSFSRASSILNHKKLHCRKKPFKCEDCGKRLVHRSFCKDQQGDHNGENSSKCEDCGKRYKRRLNLDIILSLFLND

SEQ ID NO: 33744 - protein, 26 aa, Homo sapiens
  MAP TO AC018725.1; EXPRESSED IN HELA, SIGNAL = 0.6
AARLLRKQDHMKTALASKSGNKLQVT

SEQ ID NO: 33745 - protein, 302 aa, Homo sapiens
  MAP TO AC023066.2; EXPRESSED IN HELA, SIGNAL =  15; SWISSPROT HIT: Q01105, EVALUE 1.00e-111
MVWFLDFPNSMAPKRQSPLPLQKKKPRPPPALGLEETSASAGLPKKGEKEQQEAIEHIDEVQNEIDRLNEQDSEEILKVEQKYNKLRQPFFQKRSELIAKIPNFGVTTFVNHPQVSSLLGEEDEEALHYLTKVEVTEFEDIKSGYRIDFYFDENPYFENKVFSKEFHLNESGDPSSKSTKIKWKSGKDVTKRSSQTQNKASRKRQHEEPESFFTWFTDHSDAGADELEEVIKDDIWPNPLQYYLVPDMDDEEGGEDDDDDDDDGDEGEEELEDIDEGDEDEGEEDEDDDEGEEGEEDEGEDD

SEQ ID NO: 33746 - protein, 79 aa, Homo sapiens
  MAP TO AC023066.2; EXPRESSED IN HELA, SIGNAL =  15; SWISSPROT HIT: P12348, EVALUE 2.60e+00
HPTVFCLLPDEQGDSWSGSWTSLTAWPLNASLHSHFKRRNQDHLLLWDWRRHRPLQACRRREKKNSKKQLNTLMKYKMK

SEQ ID NO: 33747 - protein, 204 aa, Homo sapiens
  MAP TO AC024584.4; EXPRESSED IN HELA, SIGNAL = 1.3; SWISSPROT HIT: P15276, EVALUE 2.30e-01
MLFGVKDIALLEHGCKALEVDSYKSLMILGIPEDCNHEEFEEIIRLPLKPLGKFEVAGKAYLEEDKSKAAIIQLTEDINYAVVPREIKGKGGVWRVVYMPRKQDIEFLTKLNLFLQSEGRTVEDMARVLRQELCPPATGPRELPARKCSVPGLGEKPEAGATVQMDVVPPLDSSEKESKAGVGKRGKRKNKKNRRRHHASDKKL

SEQ ID NO: 33748 - protein, 38 aa, Homo sapiens
  MAP TO AC024584.4; EXPRESSED IN HELA, SIGNAL = 1.3
LWEGIAASWIISWIPEAAQVSTSGHTAASKSWARCCSG

SEQ ID NO: 33749 - protein, 39 aa, Homo sapiens
  MAP TO AC024584.4; EXPRESSED IN HELA, SIGNAL = 1.3
WTWCHLWTPPRRRARLELARGAKGRTRKTAGGITPQTRS

SEQ ID NO: 33750 - protein, 215 aa, Homo sapiens
  MAP TO AC006208.3; EXPRESSED IN HELA, SIGNAL = 0.87; EXPRESSED IN PLACENTA, SIGNAL = 2.8; SWISSPROT HIT: Q93050, EVALUE 6.50e+00
PEHAEPEVQVVPGSGQIIFLPFTCIGYTATNQDFIQRLSTLIRQAIERQLPAWIEAANQREEGQGEQGEEEDEEEEEEEDVAENRYFEMGPPDVEEEEGGGQGEEEEEEEEDEEAEEERLALEWALGADEDFLLEHIRILKVLWCFLIHVQGSIRQFAACLVLTDFGIAVFEIPHQESRGSSQHILSSLRFVFCFPHGDLTEFGFLMPELCLVLK

SEQ ID NO: 33751 - protein, 47 aa, Homo sapiens
  MAP TO AC006208.3; EXPRESSED IN HELA, SIGNAL = 0.87; EXPRESSED IN PLACENTA, SIGNAL = 2.8; SWISSPROT HIT: P23327, EVALUE 2.80e+00
VPLPARLQPAAGLAAGPEDCGHRQDPRDGRQPPGLLCGWPACRAQGQ

SEQ ID NO: 33752 - protein, 19 aa, Homo sapiens
  MAP TO AC006208.3; EXPRESSED IN HELA, SIGNAL = 0.87; EXPRESSED IN PLACENTA, SIGNAL = 2.8
SCPSPALATRPPIRTSSSA

SEQ ID NO: 33753 - protein, 19 aa, Homo sapiens
  MAP TO Z97183.1; EXPRESSED IN LUNG, SIGNAL = 1.3; EXPRESSED IN HELA, SIGNAL = 0.99; EXPRESSED IN PLACENTA, SIGNAL = 3.3
MVRNMVKSMGPGASFIMAS

SEQ ID NO: 33754 - protein, 213 aa, Homo sapiens
  MAP TO AC007869.2; EXPRESSED IN HELA, SIGNAL = 0.4; SWISSPROT HIT: Q9NPC2, EVALUE 6.00e-32
MALRSGAGCFGRVWRRVSGFPDAWPRRSSSLLCLSAFSAEPGPAPPLPRQPPRGGGGCGGPSGGGPPQPPRPPPPRCCCCCCRRRLQLGGGGGGGGGGGGGGRRALQWDARGCEPAGHAPRAGSLLAAMKRQNVRTLSLIVCTFTYLLVGAAVFDALESDHEMREEEKLKAEEIRIKGKYNISSEDYRQLELVILQSEPHRAGVQWKFAGSFY

SEQ ID NO: 33755 - protein, 25 aa, Homo sapiens
  MAP TO AC007869.2; EXPRESSED IN HELA, SIGNAL = 0.4
AQGVGVPGRLAPALEQPPVPVRLLG

SEQ ID NO: 33756 - protein, 98 aa, Homo sapiens
  MAP TO AC012467.9; EXPRESSED IN HELA, SIGNAL = 0.38; SWISSPROT HIT: P78741, EVALUE 6.70e-02
MSTNTLFSFSLGKPFAPLPSSRQTPAQSPGSYTGHREAFYPSVGGGAFLLPHPLACACPSWHIQNSSEIPVCPSLPPPSSFEQPHQAGPAAPCPGRPL

SEQ ID NO: 33757 - protein, 30 aa, Homo sapiens
  MAP TO AC012467.9; EXPRESSED IN HELA, SIGNAL = 0.38; SWISSPROT HIT: P17444, EVALUE 3.00e-05
ATQQAGYPLTEDMNGFQQEGFGWMDMTIHE

SEQ ID NO: 33758 - protein, 34 aa, Homo sapiens
  MAP TO AC012467.9; EXPRESSED IN HELA, SIGNAL = 0.38; SWISSPROT HIT: Q61345, EVALUE 6.60e+00
VVSPTRPGPAWSPGTGSPGAAAIPGCPGPGQRRL

SEQ ID NO: 33759 - protein, 215 aa, Homo sapiens
  MAP TO AL121901.10; EXPRESSED IN HELA, SIGNAL = 0.64; SWISSPROT HIT: Q07889, EVALUE 4.10e-01
SRNGGLLGSSGLLGTGLLKNGQVLGNGGVLGTGLLSGNNHQAGANSGSPTTRVAAHLSEPNHLENDQEYIYLSSPHAEDATEYSIKPGKSSMFQMPTLLPTPPVRMAASAPTPSVRIHVTNQDTMGKLGQSEMGGPGSTDKSAVISQGSLGHKGMTTPGQLSQKVIKSLGYSDHKWMTQSGHTGVGDMSFSGSGQPSDASSGNAVVSGVASPGSY

SEQ ID NO: 33760 - protein, 164 aa, Homo sapiens
  MAP TO AC005663.1; EXPRESSED IN HELA, SIGNAL = 0.76; SWISSPROT HIT: O00192, EVALUE 9.00e-91
AYEDTADDGGELADERPAFPMVTAPLAQPERGSMGSLDRLVRRSPSVDSARKEPRWRDPELPEVLAMLRHPVDPVKANAAAYLQHLCFENEGVKRRVRQLRGLPLLVALLDHPRAEVRRRACGALRNLSYGRDTDNKAAIRDCGGVPALVRLLRAARDNEVREL

SEQ ID NO: 33761 - protein, 21 aa, Homo sapiens
  MAP TO AC005663.1; EXPRESSED IN HELA, SIGNAL = 0.76
PTRTQQMMAASWRTSGLRSQW

SEQ ID NO: 33762 - protein, 264 aa, Homo sapiens
  MAP TO AL031133.1; EXPRESSED IN HELA, SIGNAL = 0.25
KKCTYGIKCKFYHPERPHHAQLAVADELRAKTGARPGAGAEEQRPPRAPGGSAGARAAPREPFAHSLPPARGSPDLAALRGSFSRLAFSDDLGPLGPPLPVPACSLTPRLGGPDWVSAGGRVPGPLSLPSPESQFSPGDLPPPPGLQLQPRGEHRPRDLHGDLLSPRRPPDDPWARPPRSDRFPGRSVWAEPAWGDGATGGLSVYATEDDEGDARARARIALYSVFPRDQVDRVMAAFPELSDLARLILLVQRCQSAGAPLGKP

SEQ ID NO: 33763 - protein, 121 aa, Homo sapiens
  MAP TO AL031133.1; EXPRESSED IN HELA, SIGNAL = 0.25; SWISSPROT HIT: P03181, EVALUE 1.70e-01
QEPGRPPGNHLRTASRRRGGPRTWPPCEGASLGWPSATTWGPWGRLSRSPPAASRPDWAGPTGCPRAAGCQARSASLARRASSPRATSRLRPACSSSRGANTALGTCTATCFPRAGHPTTR

SEQ ID NO: 33764 - protein, 379 aa, Homo sapiens
  MAP TO U65406.1; EXPRESSED IN HELA, SIGNAL = 0.58; SWISSPROT HIT: P48048, EVALUE 0.00e+00
IRVLTESMFKHLRKWVVTRFFGHSRQRARLVSKDGRCNIEFGNVEAQSRFIFFVDIWTTVLDLKWRYKMTIFITAFLGSWFFFGLLWYAVAYIHKDLPEFHPSANHTPCVENINGLTSAFLFSLETQVTIGYGFRCVTEQCATAIFLLIFQSILGVIINSFMCGAILAKISRPKKRAKTITFSKNAVISKRGGKLCLLIRVANLRKSLLIGSHIYGKLLKTTVTPEGETIILDQININFVVDAGNENLFFISPLTIYHVIDHNSPFFHMAAETLLQQDFELVVFLDGTVESTSATCQVRTSYVPEEVLWGYRFAPIVSKTKEGKYRVDFHNFSKTVEVETPHCAMCLYNEKDVRARMKRGYDNPNFILSEVNETDDTKM

SEQ ID NO: 33765 - protein, 355 aa, Homo sapiens
  MAP TO AC013648.3; EXPRESSED IN HELA, SIGNAL = 5.7; SWISSPROT HIT: gi1351900, EVALUE 4.00e-33
VEVSLPSVEVDVEAPGAKLDGARLEGDLSLADKDMTAKDSKFKMPKFKMPSFGVSAPGKSMEASVDVTAPKVEADVSLPSMQGDLKATDLSVQPPSADLEVQAGQVDVKLPEGPVPEGASLKGHLPKVQMPSFKMPKVDLKGPQIDVKGPKLDLKGPKAEVTAPDVKMSLSSMEVDVQAPRAKLDGVQLEGDLSLADKDVTAKDSKFKMPKFKMPSFGVSAPGKSMEASVDVSELKAKADVSLPSMQGDLKTTDLSIQSPSADLEVQAGQVDVKLPEGPLPKGAGLKGHLPKVQMPCLKMPKVALKGPQVDVKGPKLDLKGPKADVMTPVVEVSLPSMEVDVEAPGAKLDSARLE

SEQ ID NO: 33766 - protein, 47 aa, Homo sapiens
  MAP TO AC006313.1; EXPRESSED IN HELA, SIGNAL = 0.51; SWISSPROT HIT: P38745, EVALUE 8.30e+00
VWLILSVACWQPWPMTATWPSETHFSIQQLCRSVYAWPCWEHQAWVG

SEQ ID NO: 33767 - protein, 335 aa, Homo sapiens
  MAP TO AC006313.1; EXPRESSED IN HELA, SIGNAL = 0.51; SWISSPROT HIT: Q95155, EVALUE 9.00e-90
LSPSCFASSQSLSSRMNSENLTRAAVAPAEFVLLGITNRWDLRVALFLTCLPVYLVSLLGNMGMALLIRMDARLHTPMYFFLANLSLLDACYSSAIGPKMLVDLLLPRATIPYTACALQMFVFAGLADTECCLLAAMAYDRYVAIRNPLLYTTAMSQRLCLALLGASGLGGAVSAFVHTTLTFRLSFCRSRKINSFFCDIPPLLAISCSDTSLNELLLFAICGFIQTATVLAITVSYGFIAGAVIHMRSVEGSRRAASTGGSHLTAVAMMYGTLIFMYLRPSSSYALDTDKMASVFYTLVIPSLNPLIYSLRNKEVKEALRQTWSRFHCPGQGSQ

SEQ ID NO: 33768 - protein, 278 aa, Homo sapiens
  MAP TO AL136418.1; EXPRESSED IN HELA, SIGNAL = 3.6; SWISSPROT HIT: Q04893, EVALUE 8.40e-02
WIDVTWDAGGSNSYRMGAEGKFDLKLAPGYDPDTVASPKPVSSTVSGTTQSWSSLVKNNCPDKTSAAAGSSSRKGSSSSVCSVASSSDISLGSTKTERRSEIVMEHSIVSGADVHEPIVVLSSAENVPQTEVGSSSSASTSTLTAETGSENAERKLGPDSSVRTPGESSAISMGIVSVSSPDVSSVSELTNKEAASQRPLSSSASNRLSVSSLLAAGAPMSSSASVPNLSSRETSSLESFVRRVANIARTNATNNMNLSRSSSDNNTNTLGRNVMSTA

SEQ ID NO: 33769 - protein, 56 aa, Homo sapiens
  MAP TO AL136418.1; EXPRESSED IN HELA, SIGNAL = 3.6; SWISSPROT HIT: Q9Y5J3, EVALUE 5.00e-02
AGLMSPGMLVAQTLTVWAQKENLTSSLHQGTTLIQWHHPNLFHPLFQAQRNHGAAW

SEQ ID NO: 33770 - protein, 168 aa, Homo sapiens
  MAP TO AC004908.1; EXPRESSED IN HELA, SIGNAL = 1.4; SWISSPROT HIT: P52742, EVALUE 4.00e-40
RSHTQEDPFLCNDLGEDFTQHIALTQNVITYMRTKHFVSKKFGKIFSDWLSFNQHKEIHTKCKSYGSHLFDYAFIQNSALRPHSVTHTREITLECRVCGKTFSKNSNLRRHEMIHTGEKPHGCHLCGKAFTHCSDLRKHERTHTGEKPYGCHLCGKAFSKSSNLRRHE

SEQ ID NO: 33771 - protein, 249 aa, Homo sapiens
  MAP TO AC002425.1; EXPRESSED IN HELA, SIGNAL = 0.33
MSFLVRFSQAPGKASEASGFTDPACLGPASRLLSCSSLLRARTPMSSTSPASLSSGCLVGVWAPPISSGPWPLVTLCVRPPHSTPSRPQLVWAASLSSPVSSSSGLASGVASKSAVPSASPSEGSSATGSLLLPLSSWASSACTSSSILARSALIPKSCLISASLPRRSTWPSKLSPASWPPTASLPAVWLSAASSVLSVPRTWGCLGKGLTSASLSSSPSSSRTQTFPVASRSLSPGTAPYSVCLTPS

SEQ ID NO: 33772 - protein, 248 aa, Homo sapiens
  MAP TO AC006050.1; EXPRESSED IN HELA, SIGNAL = 0.74; SWISSPROT HIT: P15087, EVALUE 6.00e-19
MASGRDERPPWRLGRLLLLMCLLLLGSSARAAHIKKAEATTTTTSAGAEAAEGQFDRYYHEEELESALREAAAAGLPGLARLFSIGRSVEGRPLWVLRLTAGLGSLIPEGDAGPDAAGPDAAGPLLPGRPQVKLVGNMHGDETVSRQVLIYLARELAAGYRRGDPRLVRLLNTTDVYLLPSLNPDGFERAREGDCGFGDGGPSGASGRDNSRGRDLNRSFPDQFSTGEPPALDEVPEVRALIEWIRRT

SEQ ID NO: 33773 - protein, 76 aa, Homo sapiens
  MAP TO AC006050.1; EXPRESSED IN HELA, SIGNAL = 0.74
AAALAARAAPVAHVPAAAGELGPGGSHQEGGGDYHNYERGRRGGRGPVRPLLPRRGVGVGAEGGGGRGPPRPGPPL

SEQ ID NO: 33774 - protein, 617 aa, Homo sapiens
  MAP TO AC006486.1; EXPRESSED IN HELA, SIGNAL = 0.4; SWISSPROT HIT: P51523, EVALUE 2.00e-53
HHQFMCSECGSLYNTLEEVLSHQEQHMLAVSEEEALTTQNVGLEPELVPGAEGPFQCGECSQLILSPGELLAHQDAHLRESANQIQYQCWDCQELFPSPELWVAHRKAQHLSATVAEPPVPPPLPPPTPLPPPSPPSEVKMEPYECPECSTLCATPEEFLEHQGTHFDSLEKEERNGLEEEEEDDEEDEEDDEEMEDEEAMAEVGDDAVGGDESTAGWAQGCGDCPQHQPSAGARRQHRRTAHSPASATHPFHCSQCQRSFSSANRLQAHGRAHVGGTHECTTCSKVFKKAASLEQHLRLHRGEARYLCVDCGRGFGTELTLVAHRRAHTANPLHRCRCGKTFSNMTKFLYHRRTHAGKSGAPPTGATAPPAPAEPTPPPPPPAPPAQLPCPQCSKSFASASRLSRHRRAVHGPPERRHRCGVCGKGFKKLIHVRNHLRTHTGERPFQCHSCGKTFASLANLSRHQLTHTGARPYQCLDCGKRFTQSSNLQQHRRLHLRPVAFARAPRLPITGLYNKSPYYCGTCGRWFRAMAGLRLHQRVHARARTLTLQPPRSPSPAPPPPPEPQQTIMCTELGETIAIIETSQPLALEDTLQLCQAALGASEAGGLLQLDTAFV

SEQ ID NO: 33775 - protein, 22 aa, Homo sapiens
  MAP TO AC006486.1; EXPRESSED IN HELA, SIGNAL = 0.4; SWISSPROT HIT: P97609, EVALUE 5.20e+00
WPRCQHRCHQGQWRCQHLCRQR

SEQ ID NO: 33776 - protein, 17 aa, Homo sapiens
  MAP TO AP000546.1; EXPRESSED IN HELA, SIGNAL = 1.6
CLNYLMYQDSTLQFRRY

SEQ ID NO: 33777 - protein, 170 aa, Homo sapiens
  MAP TO Z97205.1; EXPRESSED IN HELA, SIGNAL = 0.48
MQGPLLHLEAPLLHMQVPLLHMQAPLLHLQAPLLHLQAPLLHLQVPLLHLQAPLLHLQAPLLHLQAPLLHLQAPLLHLQVPLLHLQAPLLHLQAPLLHLQAPLLHLQALLLHLQAPLLHLQAPLLHLQALLLHLQAPLLHLQALLLHLQAPLLHLQAPLLHLQALLLHMQ

SEQ ID NO: 33778 - protein, 189 aa, Homo sapiens
  MAP TO AC005952.1; EXPRESSED IN HELA, SIGNAL = 0.26; SWISSPROT HIT: Q9Y2A9, EVALUE 1.00e-100
MKYLRHRRPNATLILAIGAFTLLLFSLLVSPPTCKVQEQPPAIPEALAWPTPPTRPAPAPCHANTSMVTHPDFATQPQHVQNFLLYRHCRHFPLLQDVPPSKCAQPVFLLLVIKSSPSNYVRRELLRRTWGRERKVRGLQLRLLFLVGTASNPHEARKVNRLLELEAQTHGDILQWDFHDSFFNLTLKQ

SEQ ID NO: 33779 - protein, 160 aa, Homo sapiens
  MAP TO AC005530.1; EXPRESSED IN HELA, SIGNAL = 0.39; SWISSPROT HIT: Q9ZDF6, EVALUE 6.70e+00
MSVTLVGTKVAETVVEVAVAPEAVVEAKKGDEAKAKAVEVTDTAVDGKVASEPVVEAMLLPDPEVTSEAVLTAMLLVDIAVEAVVVSESVEEAVVGIDTIMEALGVSESVREAVEVSVAVVVSDLVVEAVVVSEPIMDKNPAVFSEVILEVVVGTDTIVE

SEQ ID NO: 33780 - protein, 22 aa, Homo sapiens
  MAP TO AL138846.2; EXPRESSED IN PLACENTA, SIGNAL = 2.7; EXPRESSED IN HELA, SIGNAL =   2
WRVPWRSSRTCSSSTILRRLRA

SEQ ID NO: 33781 - protein, 19 aa, Homo sapiens
  MAP TO AC006541.1; EXPRESSED IN HELA, SIGNAL = 0.23; SWISSPROT HIT: P31696, EVALUE 3.00e+00
GPCGHPCIHGALCGGDGSW

SEQ ID NO: 33782 - protein, 21 aa, Homo sapiens
  MAP TO AC006486.1; EXPRESSED IN HELA, SIGNAL = 0.89
ALAFQVLAVAASPPQPPGPRL

SEQ ID NO: 33783 - protein, 236 aa, Homo sapiens
  MAP TO AL021182.1; EXPRESSED IN HELA, SIGNAL = 0.86; SWISSPROT HIT: P10220, EVALUE 3.00e-05
MLDKPPQIQVLVSIPGPGQPQQPWAVDHIWAGPSGPRPQAGPSNRTAPTALVIRLAPMDPASRSASVDIGSRPTQLQPSPLQPKAPGLPQGSEQLRARSTHTALGSRPISAPGEYYWPQPQVPYWSQGTLDPGLSSQPKASGQPLCHQSPDHHSCYQAPDQSPQTQASHLPQDQAGPGPQRVQSHSLIQQTQGPGLSQFTQAPDQTLWTQALGQPPRLQAPSLPMRTQAQAHLYKP

SEQ ID NO: 33784 - protein, 325 aa, Homo sapiens
  MAP TO AP000501.1; EXPRESSED IN HELA, SIGNAL = 1.3; SWISSPROT HIT: P13945, EVALUE 6.00e-04
MAGPPHPGAQYRQHQWAARGSVGGGPSRGPAGAGGAGHRGRQPAGHRGHRLDSETPDHDQRVRDFAGRSRPGDGTPGGAAGGHLGADWPLAVGRHWLRAVDLGGRAVCDRQHRNPVRPGRGPLPGCDQPAALRRTGHQALRPDSCGPGVGRVGRGVVCAHHEPVVARRGRRRGAALPLQPALLCLRLQHALRAAVLLRLLLPSSSRDALRLRAGFRGGYAPAALAARGAGPLSARGVSAGAVALSGPGPGGDVRSARRGARLRPAARAPPASPGTPGPVHLGSHHGHLHSLLVALLSGQRAARPGGAPTLVPGPAFLALNWLGYA

SEQ ID NO: 33785 - protein, 318 aa, Homo sapiens
  MAP TO AP000501.1; EXPRESSED IN HELA, SIGNAL = 1.3; SWISSPROT HIT: P13945, EVALUE 1.00e-122
PHENSSLAPWPDLPTLAPNTANTSGLPGVPWEAALAGALLALAVLATVGGNLLVIVAIAWTPRLQTMTNVFVTSLAAADLVMGLLVVPPAATLALTGHWPLGATGCELWTSVDVLCVTASIETLCALAVDRYLAVTNPLRYGALVTKRCARTAVVLVWVVSAAVSFAPIMSQWWRVGADAEAQRCHSNPRCCAFASNMPYVLLSSSVSFYLPLLVMLFVYARVFVVATRQLRLLRGELGRFPPEESPPAPSRSLAPAPVGTCAPPEGVPACGRRPARLLPLREHRALCTLGLIMGTFTLCWLPFFLANVLRALGGPLL

SEQ ID NO: 33786 - protein, 208 aa, Homo sapiens
  MAP TO AL121756.2; EXPRESSED IN HELA, SIGNAL = 0.5
ISGMLQQSDALHSALREVPLGKARGDGGGPLLGGLLGGSGSGGGGGGGLLGGLLGGGGGGGGSDLLGGGLLGGSGSSGGELLGGGGGSGGGLLGGSGGGLLGGSGGGLLGGSRGGLLGGSGGGLLGGGRHHYNDYRRIEFPRGVGDIPYNDFHVRGPPPVYTNGKKLDGIYQYGHIETNDNTAQLGGKYRYGEILESEGSIRDLRNSG

SEQ ID NO: 33787 - protein, 42 aa, Homo sapiens
  MAP TO Z97183.1; EXPRESSED IN HELA, SIGNAL = 0.4
IQRLEQLLALYVAEIRRLQEKELDLSELDDPDSAYLQEARLK

SEQ ID NO: 33788 - protein, 92 aa, Homo sapiens
  MAP TO Z97183.1; EXPRESSED IN HELA, SIGNAL = 0.4; SWISSPROT HIT: P51451, EVALUE 1.70e-01
QRIPYRGTRYPEVNRRIERLINKPGPDTFPDYGDVLRAVEKAAARHSLGLPRQQLQLMAQDAFRDVGIRLQERRHLDLIYNFGCHLTDDYRP

SEQ ID NO: 33789 - protein, 73 aa, Homo sapiens
  MAP TO Z97183.1; EXPRESSED IN HELA, SIGNAL = 0.4
SLNFVRCRQQTTLRWSHSSITGSNVPTLCFWPRRSSATSSLGSCLGPGAGQPSSMSTSMSSALFSRPTQPKRS

SEQ ID NO: 33790 - protein, 166 aa, Homo sapiens
  MAP TO AL353997.2; EXPRESSED IN HELA, SIGNAL = 2.8; EXPRESSED IN LUNG, SIGNAL = 0.98; SWISSPROT HIT: P08779, EVALUE 3.00e-27
IHEGLLQHRGQHRGRLQPHLLCPGRRVLPCPQHLRGGLCVSFSRFSFGGACGLGGGYGGGFGSSSSFASGFGGGYGGGLGAGFGGGLGAGLGGGFAGGDGLLVGSEKVTMQHLGDRLASYLDKVRALEEANADLEVKIRDWYQRQRPSEIKDYSPYFKTIEDLRHK

SEQ ID NO: 33791 - protein, 58 aa, Homo sapiens
  MAP TO AL353997.2; EXPRESSED IN HELA, SIGNAL = 2.8; EXPRESSED IN LUNG, SIGNAL = 0.98
PAGWGAAMAVASAAAAALLVALGEDMVVALVLASVVAWVLAWVVALLVVMGFWWAVRR

SEQ ID NO: 33792 - protein, 375 aa, Homo sapiens
  MAP TO AC010522.3; EXPRESSED IN HELA, SIGNAL = 0.8; SWISSPROT HIT: P52742, EVALUE 0.00e+00
NHQRVHSGKRPYECGECEKSFSQKSSLIQHQQFHTGGKPYGCEECGKYFSLEGYLRRHQKVHAGKGPYECGECGKSFSSNVNLKSHQRIHTGERPYKCGECEKSFSRKPSLSYHQRIHTEVRPYKCGECGKSYISKGHLRIHQRMHTGERPYKCGDCGKSFNEKGHLRSHQRVHTTERPYKCGECGKCFSHKGNLILHQHGHTRKRPYMCWECGKLFKKKSHLLVHQRIHSGEKPYACEACQKFFRHKCHLTAHQRVHTGERPYECSDCGKSFTHSCAFIVHKRVHTGQKPYECSECGKSFAASSYLTSHRRVHTGQKPYECSECGKSFAGISSLTNHRRVHTGEKPYGCSECEKKFRKSSSLRYHQRVHERKAL

SEQ ID NO: 33793 - protein, 88 aa, Homo sapiens
  MAP TO AC010522.3; EXPRESSED IN HELA, SIGNAL = 0.8; SWISSPROT HIT: O43296, EVALUE 9.90e-02
NILAPNIYSVSTRDFSLEKNVMCAVNVGNPLANMLASVIIREFTVEKDLMNVENVRNLLVKRAASFNISNFTLEENLMGVKNVGNILA

SEQ ID NO: 33794 - protein, 92 aa, Homo sapiens
  MAP TO AL031708.3; EXPRESSED IN HELA, SIGNAL = 1.1; SWISSPROT HIT: P00952, EVALUE 9.70e-01
GQPAARPPKEVPASRLAQQLREEGWNLQTSESLTLAEVYLMMGKPSKLQLEYDWLGPGRQDPRPGSLPTALHKQRLLSCLLKLISTEVNPKL

SEQ ID NO: 33795 - protein, 28 aa, Homo sapiens
  MAP TO AL031708.3; EXPRESSED IN HELA, SIGNAL = 1.1
CQWGAWLVSVPMCLVSIPTSVLASVGLP

SEQ ID NO: 33796 - protein, 55 aa, Homo sapiens
  MAP TO AL034384.1; EXPRESSED IN HELA, SIGNAL = 1.5
ELLRGDKKKTTSSFQTWLMGATLIKLRGLALKMSPLQWAQVLILVLLVQNCRSLH

SEQ ID NO: 33797 - protein, 80 aa, Homo sapiens
  MAP TO AL121774.3; EXPRESSED IN HELA, SIGNAL = 1.8; EXPRESSED IN LUNG, SIGNAL = 0.99; SWISSPROT HIT: P11277, EVALUE 2.00e-37
WQAFQTLVSERREAVDSALRVHNYCVDCEETSKWITDKTKVVESTKDLGRDLAGIIAIQRKLSGLERDVAAIQARVDALE

SEQ ID NO: 33798 - protein, 92 aa, Homo sapiens
  MAP TO AL121774.3; EXPRESSED IN HELA, SIGNAL = 1.8; EXPRESSED IN LUNG, SIGNAL = 0.99; SWISSPROT HIT: P11277, EVALUE 4.00e-48
AEQLLQQHAGIKDEIDGHQDSYQRVKESGEKVIQGQTDPEYLLLGQRLEGLDTGWNALGRMWESRSHTLAQCLGFQEFQKDAKQAEAILSNQ

SEQ ID NO: 33799 - protein, 40 aa, Homo sapiens
  MAP TO AL121774.3; EXPRESSED IN HELA, SIGNAL = 1.8; EXPRESSED IN LUNG, SIGNAL = 0.99
LRGDQQVDHGQDKGSGVHKRPGAGPGRYHRHPEEVVRAGA

SEQ ID NO: 33800 - protein, 198 aa, Homo sapiens
  MAP TO AL160492.1; EXPRESSED IN HELA, SIGNAL = 0.52; SWISSPROT HIT: P47160, EVALUE 5.00e-37
MTTSSIRRQMKNIVNNYSEAEIKVREATSNDPWGPSSSLMTEIADLTYNVVAFSEIMSMVWKRLNDHGKNWRHVYKALTLLDYLIKTGSERVAQQCRENIFAIQTLKDFQYIDRDGKDQGINVREKSKQLVALLKDEERLKAERAQALKTKERMAQVATGMGSNQITFGRGSSQPNLSTSHSEQEYGKAGGSPASYHG

SEQ ID NO: 33801 - protein, 349 aa, Homo sapiens
  MAP TO AF236875.1; EXPRESSED IN HELA, SIGNAL = 0.98; SWISSPROT HIT: P08640, EVALUE 3.20e-02
MVGLHNLEPRGERNIAFHPVSFPEEKAVHKEKPSFPYQDRPSTQESFRQKLAAFAGTTSGCHQGPGPLRESLPSEDDSDQRCSPSGDSEGGEYCSILDCCPGSPVAKAASQTAGSRGRHGGRDCSPTCWEQGKCSGPAEQEKRGPSFPKECCSQGPTAHPSCLGPKKLSLTSEAAISSDGLSCGSGSGSGASSPFVPHLESDYCSLMKEPAPEKQQDPGCPGVTPSRCLGLTGEPQPPAHPREGTQPEPIYAESTKRKKAAPVPSKSQAKIEHAAAAQGQGQVCTGNAWAQKAASGWGRDSPDPTPQVSATITVMAAHPEEDHRTIYLSSPDSAVGVQWPRGPVSQNSE

SEQ ID NO: 33802 - protein, 19 aa, Homo sapiens
  MAP TO AF236875.1; EXPRESSED IN HELA, SIGNAL = 0.98
WSACTTLSPAARGTLPSTR

SEQ ID NO: 33803 - protein, 312 aa, Homo sapiens
  MAP TO AC011802.4; EXPRESSED IN HELA, SIGNAL = 0.48; SWISSPROT HIT: Q9XPS9, EVALUE 1.20e-02
KPSNPKKENLLLSSNGCDEVKLTFPDDDWNSSTLEQRANNKEISNIDKMDLLEPFFSVSQDTNTESTQFQSSELEDSTDYAFLNKTYSIPYSESKLKKESLTPLSSELDPEVQKKEEVFFNILEHQDKTVGLERIYNISDANYRESAEDTQKHDTDEDSQQEYHSAEEQEYISNHLSFDQTKALDISNPEVVELGNSGYEVKCASNVEDNRVNSGSGSIISFDSLDVYGQEESLHVSKFQNSVMLREYHDLKHEKYKEQETNSMYHTVFDGSVLRSNSPGNQESQSKSGSLSPQKVLKMKIYTENMKSQINE

SEQ ID NO: 33804 - protein, 22 aa, Homo sapiens
  MAP TO AC011802.4; EXPRESSED IN HELA, SIGNAL = 0.48
INLQIQRKKICYYPPMVVMKSN

SEQ ID NO: 33805 - protein, 35 aa, Homo sapiens
  MAP TO AP000556.2; EXPRESSED IN HELA, SIGNAL = 0.3
RLPLRGYFGKSKMPKGSHLPSWAPANSMHLTSITF

SEQ ID NO: 33806 - protein, 176 aa, Homo sapiens
  MAP TO AL023580.1; EXPRESSED IN HELA, SIGNAL = 0.64; SWISSPROT HIT: Q13516, EVALUE 2.00e-51
MHDLNLAMDGLREVMPYAHGPSVRKLSKIATLLLARNYILMLTSSLEEMKRLVGEIYGGHHSAFHCGTVGHSAGHPAHAANSVHPVHPILGGALSSGNASSPLSAASLPAIGTIRPPHSLLKAPSTPPALQLGSGFQHWAGLPCPCTICQMPPPPHLSALSTANMARLSAESKDLL

SEQ ID NO: 33807 - protein, 249 aa, Homo sapiens
  MAP TO AL023580.1; EXPRESSED IN HELA, SIGNAL = 0.64; SWISSPROT HIT: P16014, EVALUE 3.10e-01
GPPPPPPPPPGEPSQLGLVHAGRYDAEDARGKPLAGWRQGRGREQQVQNQEAAVGAGPTAVEAEDQRTRTQADARPEPSHGRAARSHALRAWAVGAQALQDRHTPARQKLHPHAHQLPGGDEEAGWRDLWGPPLGLSLRDRGPLGRPPRARGQLRAPGAPHLGRRALIWQRLVTAVRRLTSRHRHHPASPLATQGALHAARAAAGQRLPALGWSALPLHHLPDAAAAAPVRSLHSQHGPAVGRVQGLAQ

SEQ ID NO: 33808 - protein, 209 aa, Homo sapiens
  MAP TO AF030453.1; EXPRESSED IN HELA, SIGNAL = 1.7; SWISSPROT HIT: P39880, EVALUE 3.00e-55
SRIRRELFIEEIQAGSQGQAGASDSPSARSGRAAPSSEGDSCDGVEATEGPGSADTEEPKSQGEAEREEVPRPAEQTEPPPSGTPGPDDARDDDHEGGPVEGPGPLPSPASATATAAPAAPEDAATSAAAAPGEGPAAPSSAPPPSNSSSSSAPRRPSSLQSLFGLPEAAGARDSRDNPLRKKKAANLNSIIHRLEKAASREEPIEWEF

SEQ ID NO: 33809 - protein, 65 aa, Homo sapiens
  MAP TO AF176315.1; EXPRESSED IN HELA, SIGNAL = 0.33
LDEDGPAVEDAVSHLAQREDVHLRRAGHQAAEPRGEHCQAVGAAAQRAQRLADGQAAVQGHEQQQ

SEQ ID NO: 33810 - protein, 107 aa, Homo sapiens
  MAP TO AF176315.1; EXPRESSED IN HELA, SIGNAL = 0.33
IRASPSHQAPSSWVSQPWLPSLGALASQTLHICTKKKGVQHTMKASTMMKVILTMRILALEMSLTLLTRARATRPPSPAAAPSGASAAAAAAVLSRKFCQILKLIRP

SEQ ID NO: 33811 - protein, 54 aa, Homo sapiens
  MAP TO AF176315.1; EXPRESSED IN HELA, SIGNAL = 0.33
SATSRREKMCTCGALATRQPSHVASTARRSVRRRSERSGWQMARQRSRDMSSSR

SEQ ID NO: 33812 - protein, 240 aa, Homo sapiens
  MAP TO AL136001.1; EXPRESSED IN HELA, SIGNAL = 0.37; SWISSPROT HIT: Q9JL04, EVALUE 1.20e+00
MKTHSVGQQTTPERLKKVGSQGLPAQACCHGQNPGGHRVPRQWPQHCALPPGVLACLCGAGDWESRACDLRPPSLRVEVTTLDQGLPQLVAEDRQEYVWHSCGPLLGTQALPPAPLPLEGQPWHGHGGLPPGTSPTQYINEWVWLFQENCVYTHRCARPGRRALVCRPLFETSGSQMCTCISITQSGVRVWTPGPHAELLSGAWALHFHRFQVLLLERRPRSEHPALEEEMQKRQAGLQK

SEQ ID NO: 33813 - protein, 52 aa, Homo sapiens
  MAP TO AC004794.1; EXPRESSED IN HELA, SIGNAL = 0.73; SWISSPROT HIT: Q9RWA5, EVALUE 7.40e-01
TSAAYCKWMGRPGPEQGHCEGGRTSCGWTTPSTWSWRPPGSCAPWCLRGTLA

SEQ ID NO: 33814 - protein, 214 aa, Homo sapiens
  MAP TO AC004794.1; EXPRESSED IN HELA, SIGNAL = 0.73; SWISSPROT HIT: Q92618, EVALUE 4.50e-01
AAPASPPTKASRTKSPGPARRLSIKMKKLPELRRRLSLRGPRAGRERERAAPAGSVISRYHLDSSVGGPGPAAGPGGTRSPRAGYLSDGDSPERPAGPPSPTSFRPYEVGPAARAPPAALWGRLSLHLYGLGGLRPAPGATPRDLCCLLQVDGEARARTGPLRGGPDFLRLDHTFHLELEAARLLRALVLAWDPGVRRHRPCAQGTVLLPTVFR

SEQ ID NO: 33815 - protein, 177 aa, Homo sapiens
  MAP TO AL163248.2; EXPRESSED IN HELA, SIGNAL = 1.1; SWISSPROT HIT: P73625, EVALUE 3.80e+00
RRHGHGNHWSYHVPHHPEAAVLIEWWISLSKSQFQCQLGDNTLQGWGKVLQKAMYAVNQCPIYGTVSLTARIHRSRNQGVEVEVAPLTITFSNQLPNFLLPVPATLRCAGLEVLIAEGGMLPPGDTTIPLNWKLRLPPGHFGLLLPLSQHTKKGVTVLVGVTDLDFQDEISLLLHKG

SEQ ID NO: 33816 - protein, 17 aa, Homo sapiens
  MAP TO AL163248.2; EXPRESSED IN HELA, SIGNAL = 1.1
ETSWSWKSLVLPCSPSS

SEQ ID NO: 33817 - protein, 208 aa, Homo sapiens
  MAP TO AC011547.3; EXPRESSED IN HELA, SIGNAL = 1.2; EXPRESSED IN PLACENTA, SIGNAL = 1.4; SWISSPROT HIT: P15276, EVALUE 3.00e-09
KVGLRPPLWASVFPSVTHQALWASVSPSATHRALWASVSPSATHRALWASVSPSATHRALWASVSPSATPRALWASVSPSATHRALWASVSPSATPRALWASVSPSATPRALWASVSPSATHRALWASVSPSATHRALWASVSPSATHRALWASVSPSATPRALWASVSPSATPRALWASVSPSATHRALWASVSPSATHRALWASVS

SEQ ID NO: 33818 - protein, 312 aa, Homo sapiens
  MAP TO AC002455.1; EXPRESSED IN HELA, SIGNAL = 1.8; EXPRESSED IN LUNG, SIGNAL = 1.9; SWISSPROT HIT: P23613, EVALUE 2.00e-59
VVLDQSRAMAAHLLPICALFLTLLDMAQGFRGPLLPNRPFTTVWNANTQWCLERHGVDVDVSVFDVVANPGQTFRGPDMTIFYSSQLGTYPYYTPTGEPVFGGLPQNASLIAHLARTFQDILAAIPAPDFSGLAVIDWEAWRPRWAFNWDTKDIYRQRSRALVQAQHPDWPAPQVEAVAQDQFQGAARAWMAGTLQLGRALRPRGLWGFYGFPDCYNYDFLSPNYTGQCPSGIRAQNDQLGWLWGQSRALYPSIYMPAVLEGTGKSQMYVQHRVAEAFRVAVAAGDPNLPVLPYVQIFYDTTNHFLPLVSLL

SEQ ID NO: 33819 - protein, 20 aa, Homo sapiens
  MAP TO AC002455.1; EXPRESSED IN HELA, SIGNAL = 1.8; EXPRESSED IN LUNG, SIGNAL = 1.9
LSSTSPVPWQPTCFPSAPSS

SEQ ID NO: 33820 - protein, 54 aa, Homo sapiens
  MAP TO AC002455.1; EXPRESSED IN HELA, SIGNAL = 1.8; EXPRESSED IN LUNG, SIGNAL = 1.9; SWISSPROT HIT: P34088, EVALUE 1.60e+00
STCPQCWRAQGSHRCMCNTVWPRHSVWLWLLVTPICRCCPMSRSSMTRQTTFCP

SEQ ID NO: 33821 - protein, 21 aa, Homo sapiens
  MAP TO AC002455.1; EXPRESSED IN HELA, SIGNAL = 1.8; EXPRESSED IN LUNG, SIGNAL = 1.9
GSPPASHLRPLPDLTRYGPRL

SEQ ID NO: 33822 - protein, 172 aa, Homo sapiens
  MAP TO U66083.1; EXPRESSED IN HELA, SIGNAL = 0.47; SWISSPROT HIT: Q64317, EVALUE 1.40e-01
IYCNSNFQRDKPRLLENIQRKDALRNTAQQATRVPTPKRKNLVATRRSLRIYHINARKEAIKMCQQGAPSVQGPSGTQSFRRSGMWSKKSATRHPLGNGPPQEPNGPSWEGTSGNVTFTSSATTWMEGTGILSSLVYSDNGSVMSLYNICYYALLASLSVMSPNEPSDDEEE

SEQ ID NO: 33823 - protein, 33 aa, Homo sapiens
  MAP TO AL136365.3; EXPRESSED IN LUNG, SIGNAL = 0.98; EXPRESSED IN HELA, SIGNAL = 2.1
LTEERLGDGKSADNTEVFSDKDTDQRSSPDVAK

SEQ ID NO: 33824 - protein, 144 aa, Homo sapiens
  MAP TO AL356019.2; EXPRESSED IN HELA, SIGNAL = 0.94; SWISSPROT HIT: P23270, EVALUE 1.00e-37
LRPMNRSATHIVTEFILLGFPGCWKIQIFLFSLFLVIYVLTLLGNGAIIYAVRCNPLLHTPMYFLLGNFAFLEIWYVSSTIPNMLVNILSKTKAISFSGCFLQFYFFFSLGTTECLFLAVMAYDRYLAICHPLQYPAIMTVRFC

SEQ ID NO: 33825 - protein, 166 aa, Homo sapiens
  MAP TO U91328.1; EXPRESSED IN HELA, SIGNAL =   1; SWISSPROT HIT: P22492, EVALUE 3.00e-57
MEKLPTKKRGRKPAGLISASRKVPNLSVSKLITEALSVSQERVGMSLVALKKALAAAGYDVEKNNSRIKLSLKSLVNKGILVQTRGTGASGSFKLSKKVIPKSTRSKAKKSVSAKTKKLVLSRDSKSPKTAKTNKRAKKPRATTPKTVRSGRKAKGAKGKQQQKSP

SEQ ID NO: 33826 - protein, 68 aa, Homo sapiens; identical to SEQ ID NO: 33355
  MAP TO AL133286.5; EXPRESSED IN HELA, SIGNAL = 0.55; SWISSPROT HIT: Q99698, EVALUE 4.00e-34

SEQ ID NO: 33827 - protein, 34 aa, Homo sapiens
  MAP TO AP001687.1; EXPRESSED IN HELA, SIGNAL =  36
PLVVLVLFLLAKWRLVFSNLVCWSPLLRSVLQLK

SEQ ID NO: 33828 - protein, 19 aa, Homo sapiens
  MAP TO AL022333.1; EXPRESSED IN HELA, SIGNAL = 7.6
LRRAPQWSPRSLPRLELLR

SEQ ID NO: 33829 - protein, 155 aa, Homo sapiens
  MAP TO U91321.1; EXPRESSED IN HELA, SIGNAL = 1.5; SWISSPROT HIT: Q01443, EVALUE 7.00e-06
YYRNNWSEEDPDYPDYSGSQNRTQGYLKTQGYPDVPGPLNNPDYPGTRSNPYSVASRTRPDYPGSLAEPNYPRSLSNPDYSGTRSNAYSAASRTSPDHPTSLPEPDYSEFQSHPYHRASSRQPDYPGSQRNPDFAGSSSSGNYAGSRTHPDHFGS

SEQ ID NO: 33830 - protein, 108 aa, Homo sapiens
  MAP TO AC012360.2; EXPRESSED IN HELA, SIGNAL = 0.23; SWISSPROT HIT: P30994, EVALUE 6.00e+00
SSRSPGCCPSASRGPRSRAGRWWRCRRGPHSACWATRSSPLTAPTWSPWSVAVFFAPFGVMLCAYMCILNTVRKNAVACTTSRTAWTCGSSPGRACGACSGSNRSAWT

SEQ ID NO: 33831 - protein, 175 aa, Homo sapiens
  MAP TO AC007098.2; EXPRESSED IN HELA, SIGNAL = 0.61; SWISSPROT HIT: P32583, EVALUE 1.10e-01
AYDGFASIGISRLLEPSDMVLLAIPDKLTVMTYLYQIRAHFSGQELNVVQIEENSSKSTYKVGNYETDTNSSVDQEKFYAELSDLKREPELQQPISGAVDFLSQDDSVFVNDSGVGESESEHQTPDDHLSPSTASPYCRRTKSDTEPQKSQQSSGRTSGSDDPGICSNTDSTQAQ

SEQ ID NO: 33832 - protein, 249 aa, Homo sapiens
  MAP TO AC005414.2; EXPRESSED IN HELA, SIGNAL = 1.4; SWISSPROT HIT: P32790, EVALUE 2.70e-02
TVFSLTNGRVLQRREAMTVFSLTNGRVLQRREAMTVFSLPNGRVLQRREAMTVFSLPNGRVLQRREAMTVFSLPNGRVLQRREAMTVFSLPNGRVLQRREAMTVFSLHNGRVLQRREAMTVFSLPNGRVLQRREAMTVFSLPNGRVLQRREAMTVFSLPNGRVLQRREAMTVFSLTNGRVLQRREAMTVFSLTNGRVLHRREAMTVFSLTNGRVLHRREAMTVFSLPNGRVLQRREAMTVFSLTNGRVL

SEQ ID NO: 33833 - protein, 176 aa, Homo sapiens
  MAP TO AL031291.3; EXPRESSED IN HELA, SIGNAL = 0.93; SWISSPROT HIT: P39582, EVALUE 2.00e-03
MAASQVLGEKINILSGETVKAGDRDPLGNDCPEQDRLPQRSWRQKCASYVLALRPWSFSASLTPVALGSALAYRSHGVLDPRLLVGCAVAVLAVHGAGNLVNTYYDFSKGIDHKKSDDRTLVDRILEPQDVVRFGVFLYTLGCVCAACLYYLSPLKLEHLALIYFGGLSGSFLYTG

SEQ ID NO: 33834 - protein, 19 aa, Homo sapiens
  MAP TO AL031291.3; EXPRESSED IN HELA, SIGNAL = 0.93
KIGSPSAPGGRSVPPTCWP

SEQ ID NO: 33835 - protein, 162 aa, Homo sapiens
  MAP TO AC006070.1; EXPRESSED IN HELA, SIGNAL = 1.4; SWISSPROT HIT: O75690, EVALUE 4.00e-14
MADGCCPGNTTAIPAVPTITTYPVKGGFRHALCLPSSCHSRMWQLVTCQESCQPSIGAPSGCDPASCQPTRLPATSCVGFVCQPMCSHAACYQSGTGQSPCLVSSCQPSCSESTCCQEKCCDASPCQQSSCQESVCMSGSCQAACGQSVCCDAGSCQPSCSE

SEQ ID NO: 33836 - protein, 26 aa, Homo sapiens
  MAP TO AC006070.1; EXPRESSED IN HELA, SIGNAL = 1.4
FLPQQNVATGHMPRKLSAIHWCPKWL

SEQ ID NO: 33837 - protein, 387 aa, Homo sapiens
  MAP TO AC005332.1; EXPRESSED IN HELA, SIGNAL = 0.75; SWISSPROT HIT: O60309, EVALUE 2.00e-84
VEPSLTQQEVPAQIPEPSMEAEPSPTQQEATVQAPEPPKEVESSSQQMVPAQLPEPPKEVAAQPPAHYEVTVPTPGQDQAQHWTLPSVTVQPLDLGLTITPEPTKEVEHSTALKKAIVPPKHPKVTLPHPDQVQIQHLHLTQATVQPVDLGLTITPESTTEVELSPTTQETPTQPPKKVVPQLPVYQEVTIPTPGQDQAQHQISPSVIVQPVDLGLTITPEPTMEVEHSTPLKKTIVLPKHPKVTLPHPDQVQAQHSHLTQATVQPLDLGLTITPESTTEFEPSTALTTTPPPKHSEVTLPPSDKGQVQHSNLTQVTVQPLDLELTITTQLTTGVKPSSTMEETSTQPPDLGLPSLQNPLQRLDIYRPGEDYSSSSRPGSDSASKPD

SEQ ID NO: 33838 - protein, 311 aa, Homo sapiens
  MAP TO Z93041.1; EXPRESSED IN HELA, SIGNAL = 0.32; SWISSPROT HIT: Q05682, EVALUE 2.70e-02
MGSPPHSSAPGPPSSEAVRLLPPAPSFRPRSRLPGHHLQGLAGQDIHTGPSLSAPSTTSAPALARRLSPQHDIHNGPSLSAPNRTSTPALARQLGPQQDIHTGPSPSSPNMTSTLALARWLGPRHDIHTGPSPSAPTARTACPHSPLYTPHPKRWLHTDAGKHQDRKAQENVLARQAGWRAEQRHRASEEGQAHSRARTKISRAQMPLAELSSRVKNERKGSEHEDIAATVTHSRDERLLENTTQKHRAQELVEGRERPDVHVRGATGEEKEHGATPPNIGKNYPNLVKSRHIIVKKLATEDKIPKAIRET

SEQ ID NO: 33839 - protein, 203 aa, Homo sapiens
  MAP TO AC068323.6; EXPRESSED IN LUNG, SIGNAL =   1; EXPRESSED IN HELA, SIGNAL = 1.8; SWISSPROT HIT: P23685, EVALUE 3.00e-09
VIRHHGTLSPVTLHWNIDSDPDGDLAFTSGNITFEIGQTSANITVEILPDEDPELDKAFSVSVLSVSSGSLGAHINATLTVLASDDPYGIFIFSEKNRPVKVEEATQNITLSIIRLKGLMGKVLVSYATLDDMEKPPYFPPNLARATQGRDYIPASGFALFGANQSEATIAISILDDDEPERSESVFIELLNSTLVAKVQSRS

SEQ ID NO: 33840 - protein, 578 aa, Homo sapiens
  MAP TO AC006946.18; EXPRESSED IN HELA, SIGNAL = 0.47
MRPALGHPRSVSSASGSFPPPPAAARLQPLFLRGGSFRGRRGSGDSSTSTSTSRGGGGGRRGGGGGSPSSSTGAEREDDDESLSVSKPLVPNAALLGPPAQVGAPAGPAPVAFSSSAATSSSTSTPTSSCSMTAADFGGGAAAGAVGGPGSRSAGGAGGTGTGSGASCCPCCCCCGCPDRPGRRGRRRGCAPSPRCRWGYQALSVVLLLAQGGLLDLYLIAVTDLYWCSWIATDLVVVVGWAIFFAKNSRGRRGGAASGAHNHHLHHHHAAPPLHLPAPSAATAGAKARGARGGAGGAGGGLGAAAAAGEFAFAYLAWLIYSIAFTPKVVLILGTSILDLIELRAPFGTTGFRLTMALSVPLLYSLVRAISEAGAPPGSAGPLLLQPQRHRAAGCFLGTCLDLLDSFTLVELMLEGRVPLPAHLRYLLIAVYFLTLASPVLWLYELNAAAAAAASWGQASGPGSCSRLLRLLGGCLVDVPLLALRCLLVVSYQQPLSIFMLKNLFFLGCRGLEALEGCWDRGNRASPSRARGGYGAPPSAPPPPPPPPQGGSQLGHCISENEGGAHGYVNTLAVASQN

SEQ ID NO: 33841 - protein, 194 aa, Homo sapiens
  MAP TO AC004500.1; EXPRESSED IN HELA, SIGNAL = 0.76; SWISSPROT HIT: O60383, EVALUE 1.00e-102
ILPSVELLFNLDRITTVEHLLKSVLLYNINNSVSFSSAVKCVCNLMIKEPKSSSRTLGRAPYSFTFNSQFEFGKKHKWIQIDVTSLLQPLVASNKRSIHMSINFTCMKDQLEHPSAQNGLFNMTLVSPSLILYLNDTSAQAYHSWYSLHYKRRPSQGPDQERSLSAYPVGEEAAEDGRSSHHRHRRGQETVSSE

SEQ ID NO: 33842 - protein, 286 aa, Homo sapiens
  MAP TO AC010332.6; EXPRESSED IN HELA, SIGNAL = 0.8; SWISSPROT HIT: P51522, EVALUE 1.00e-109
HQTVHTGEKPYKCEECGKAFSVRSSLITHQLIHTGRKPYKCKECDKVFGRKCFLTSHQRIHTRERPYGCSQCGKIFSQKSDLIRHRKTHTDEKPYKCNKCGTAFREFSDLTAHFLIHSGEKPYECKECGKVFRYKSSLTSHHRIHTGEKPYKCNRCGKVFSRSSNLVCHQKIHTGEKPYKCNQCGKVFNQASYLTRHQIIHTGERPYRCSKCGKAFRGCSGLTAHLAIHTEKKSHECKECGKIFTQKSSLTNHHRIHIGEKPYKCTLCSKVFSHNSDLAQHQRVHS

SEQ ID NO: 33843 - protein, 470 aa, Homo sapiens
  MAP TO AC010582.6; EXPRESSED IN HELA, SIGNAL = 0.2; SWISSPROT HIT: P16473, EVALUE 0.00e+00
ILESLMCNESSMQSLRQRKSVNALNSPLHQEYEENLGDSIVGYKEKSKFQDTHNNAHYYVFFEEQEDEIIGFGQELKNPQEETLQAFDSHYDYTICGDSEDMVCTPKSDEFNPCEDIMGYKFLRIVVWFVSLLALLGNVFVLLILLTSHYKLNVPRFLMCNLAFADFCMGMYLLLIASVDLYTHSEYYNHAIDWQTGPGCNTAGFFTVFASELSVYTLTVITLERWYAITFAMRLDRKIRLRHACAIMVGGWVCCFLLALLPLVGISSYAKVSICLPMDTETPLALAYIVFVLTLNIVAFVIVCCCYVKIYITVRNPQYNPGDKDTKIAKRMAVLIFTDFICMAPISFYALSAILNKPLITVSNSKILLVLFYPLNSCANPFLYAIFTKAFQRDVFILLSKFGICKRQAQAYRGQRVPPKNSTDIQVQKVTHEMRQGLHNMEDVYELIENSHLTPKKQGQISEEYMQTVL

SEQ ID NO: 33844 - protein, 184 aa, Homo sapiens
  MAP TO AC002056.1; EXPRESSED IN HELA, SIGNAL = 0.38; SWISSPROT HIT: P10323, EVALUE 8.00e-38
GDSGGPLMCKDSKESAYVVVGITSWGVGCARAKRPGIYTATWPYLNWIASKIGSNALRMIQSATPPPPTTRPPPIRPPFSHPISAHLPWYFQPPPRPLPPRPPAAQPRPPPSPPPPPPPPASPLPPPPPPPPPTPSSTTKLPQGLSFAKRLQQLIEVLKGKTYSDGKNHYDMETTELPELTSTS

SEQ ID NO: 33845 - protein, 26 aa, Homo sapiens
  MAP TO AC002056.1; EXPRESSED IN HELA, SIGNAL = 0.38
ETAAGLSCAKTARKAPMWSWESQAGG

SEQ ID NO: 33846 - protein, 252 aa, Homo sapiens
  MAP TO AJ251973.1; EXPRESSED IN HELA, SIGNAL = 1.2; SWISSPROT HIT: Q9WTN3, EVALUE 2.00e-02
MLGSSVKSVQPEVELSSGGGDEGADEPRGAGRKAAAADGRGMLPKRAKAPGGGGGMAKASAAELKVFKSGSVDSRVPGGPPASNLRKQKSLTNLSFLTDSEKKLQLYEPEWSDDMAKAPKGLGKVGSKGREAPLMSKTLSKSEHSLFQAKGSPAGGAKTPLAPLAPNLGKPSRIPRGPYAEVKPLSKAPEAAVSEDGKSDDELLSSKAKAQKSSGPVPSAKGQEERAFLKVDPELVVTVLGDLEQLLFSQML

SEQ ID NO: 33847 - protein, 73 aa, Homo sapiens
  MAP TO AJ251973.1; EXPRESSED IN HELA, SIGNAL = 1.2
RADRPCAPRGQNAGQQRQERAARGGAEQRRRRRGRGRTAGRRQEGGSGGRQRHAAQARQGARRRRRHGQGQRG

SEQ ID NO: 33848 - protein, 249 aa, Homo sapiens
  MAP TO AL162387.2; EXPRESSED IN HELA, SIGNAL = 0.37
MYSSTHSLIPSFPPYTFTEMHSSTHSFTPSFPPYTFTEMHSSTHSFTSSFTPYTFTEMYSSTHSFTPSFPPYTFTEMHSSTHSFTSSFTPYTFTEMYSSTHSLIPSFPPYTFTEMHSSTHSFTSSFPPYTFTEMHSSTHSFTSSFTPYTFTEMYSSTHSLIPSFPPYTFTEMHSSTHSFTSSFTPYTFTEMYSSTHSFTPSFPPYTFTEMHSSTHSFTSSFTPYTFTEMYSSTHSLIPSFPPYTFTEMH

SEQ ID NO: 33849 - protein, 487 aa, Homo sapiens
  MAP TO AC011467.3; EXPRESSED IN HELA, SIGNAL = 0.67; SWISSPROT HIT: Q03923, EVALUE 0.00e+00
VCSYFARDLWPKQGKKNYFQKVILRRYKKCGCENLQLRKYCKSMDECKVHKECYNGLNQCLTTTQNKIFQCDKYVKVFHKFSNSNRHTIRHTGKKSFKCKECEKSFCMLSHLAQHKRIHSGEKPYKCKECGKAYNETSNLSTHKRIHTGKKPYKCEECGKAFNRLSHLTTHKIIHTGKKPYKCEECGKAFNQSANLTTHKRIHTGEKPYKCEECGRAFSQSSTLTAHKIIHAGEKPYKCEECGKAFSQSSTLTTHKIIHTGEKFYKCEECGKAFSQLSHLTTHKRIHSGEKPYKCEECGKAFKQSSTLTTHKRIHAGEKFYKCEVCSKAFSRFSHLTTHKRIHTGEKPYKCEECGKAFNLSSQLTTHKIIHTGEKPYKCEECGKAFNQSSTLSKHKVIHTGEKPYKYEECGKAFNQSSHLTTHKMIHTGEKPYKCEECGKAFNNSSILNRHKMIHTGEKLYKPESCNNACDNIAKISKYKRNCAGEK

SEQ ID NO: 33850 - protein, 22 aa, Homo sapiens
  MAP TO AC011467.3; EXPRESSED IN HELA, SIGNAL = 0.67
LYVLILPETFGQSRAKKIISKK

SEQ ID NO: 33851 - protein, 165 aa, Homo sapiens
  MAP TO AL031427.15; EXPRESSED IN HELA, SIGNAL = 0.98; SWISSPROT HIT: Q13439, EVALUE 9.70e+00
ATKAMSYYLSSENHLDPGPIYMRENGQLHMVNLALDGVRSSLQKPRPFRLFPKGFSVELCMNREDDTARKEKTDHFIFTYTREGNLRYSAKSLFSLVLGFISDNVDHIDSLIGFPEQIAEKLFSAAEARQKFTEPGAGLRALQKFTEAYGSLVLCSLCLRNRWVF

SEQ ID NO: 33852 - protein, 377 aa, Homo sapiens
  MAP TO AL049869.5; EXPRESSED IN HELA, SIGNAL = 0.97; EXPRESSED IN LUNG, SIGNAL = 1.2; SWISSPROT HIT: P24278, EVALUE 0.00e+00
ECIKIQPTDIQPDIFSYLLHIMYTGKGPKQIVDHSRLEEGIRFLHADYLSHIATEMNQVFSPETVQSSNLYGIQISTTQKTVVKQGLEVKEAPSSNSGNRAAVQGDHPQLQLSLAIGLDDGTADQQRACPATQALEEHQKPPVSIKQERCDPESVISQSHPSPSSEVTGPTFTENSVKIHLCHYCGERFDSRSNLRQHLHTHVSGSLPFGVPASILESNDLGEVHPLNENSEALECRRLSSFIVKENEQQPDHTNRGTTEPLQISQVSLISKDTEPVELNCNFSFSRKRKMSCTICGHKFPRKSQLLEHMYTHKGKSYRYNRCQRFGNALAQRFQPYCDSWSDVSLKSSRLSQEHLDLPCALESELTQENVDTILVE

SEQ ID NO: 33853 - protein, 97 aa, Homo sapiens
  MAP TO AF225898.1; EXPRESSED IN HELA, SIGNAL = 1.2; SWISSPROT HIT: P37275, EVALUE 2.00e-07
GDSDERESLTREEDEDSEKEEEEEDKEMEELQEEKECEKPQGDEEEEEEEEEVEEEEVEEAENEGEEAKTEGLMKDDRAESQASSLGQKVGESSEQV

SEQ ID NO: 33854 - protein, 18 aa, Homo sapiens
  MAP TO AF225898.1; EXPRESSED IN HELA, SIGNAL = 1.2
KDLMSVESVKRHLNTNII

SEQ ID NO: 33855 - protein, 211 aa, Homo sapiens
  MAP TO AC002286.1; EXPRESSED IN HELA, SIGNAL = 0.91; EXPRESSED IN LUNG, SIGNAL = 0.98; SWISSPROT HIT: Q9PW70, EVALUE 9.00e-15
MVAHNQVAADNAVSTAAEPRRRPEPSSSSSSSPAAPARPRPCPAVPAPAPGDTHFRTFRSHADYRRITRASALLDACGFYWGPLSVHGAHERLRAEPVGTFLVRDSRQRNCFFALSVKMASGPTSIRVHFQAGRFHLDGSRESFDCLFELLEHYVAAPRRMLGAPLRQRRVRPLQELCRQRIVATVGRENLARIPLNPVLRDYLSSFPFQI

SEQ ID NO: 33856 - protein, 155 aa, Homo sapiens
  MAP TO AC007708.13; EXPRESSED IN PLACENTA, SIGNAL = 1.7; EXPRESSED IN HELA, SIGNAL = 2.4; SWISSPROT HIT: Q9Y2N3, EVALUE 1.00e-09
MDSLWGPGAGSHPFGVHNTRLSPDLCPGKIVLRALKESGAGMPEQDKDPRVQENPGDQRRVPEVTGDAPSAFRPLRDNRGLSPFVPGPGPLQTDLHAQRSEIRYNQTSQISWTSSCTNRNAISSSYSSMGGLPGLKRRRGPASSHCQLTLSSSKT

SEQ ID NO: 33857 - protein, 551 aa, Homo sapiens
  MAP TO AF164115.1; EXPRESSED IN HELA, SIGNAL = 0.65; SWISSPROT HIT: Q92953, EVALUE 0.00e+00
TIALSLNTLPELQETDEFGQLNDNRQLAHVEAVCIAWFTMEYLLRFLSSPNKWKFFKGPLNVIDLLAILPYYVTIFLTESNKSVLQFQNVRRVVQIFRIMRILRILKLARHSTGLQSLGFTLRRSYNELGLLILFLAMGIMIFSSLVFFAEKDENATKFTSIPASFWWATITMTTVGYGDIYPKTLLGKIVGGLCCIAGVLVIALPIPIIVNNFSEFYKEQKRQEKAIKRREALERAKRNGSIVSMNLKNAFARSMELIDVAVEKAGESANTKDSADNNHLSPSRWKWARKALSETSSNKSFENKYQEVSQKDSHEQLNNTSSSSPQHLSAQKLEMLYNEITKTQPHSHPNPDCQEKPERPSAYEEEIEMEEVVCPQEQLAVAQTEVIVDMKSTSSIDSFTSCATDFTETERSPLPPPSASQLQMKFPTDLPGTEKHQRARGPPFLTLSKDKGPAARDGTLEYAPVDITVNLDASGSQCGLHIPLQSDNATDSPKSSLKGSNPLKSRSLKVNFKENRGSAPQTPPSTARPLPVTTADFSLTTPQHISTILL

SEQ ID NO: 33858 - protein, 109 aa, Homo sapiens
  MAP TO AC007957.34; EXPRESSED IN HELA, SIGNAL = 0.39; SWISSPROT HIT: Q60821, EVALUE 4.90e+00
KLLPSDQPAEPNFSTLLTAASYLQLPELAALCRRKLKRAGKPFGSGRAGSTGMGRPPRSQRLSTASVIQARYQGLVDGRKGAHAPQELPQAKGSDDELFLGGSNQDSVQ

SEQ ID NO: 33859 - protein, 353 aa, Homo sapiens
  MAP TO AC007957.34; EXPRESSED IN HELA, SIGNAL = 0.39; SWISSPROT HIT: Q61751, EVALUE 4.00e-32
PHLTPDDAAQLSDSQHGSPPAASAPPVANSASYSELGGTPDEPMDLEGAEDNHLSLLEAPGGQPRKSLRHSTRKKEWGKKEPVAGSPFERREAGPKGPCPGEEGEGVGDRVPNGILASGAGPSGPYGEPPYPCKEEEENGKDASEDSAQSGSEGGSGHASAHYMYRQEGYETVSYGDNLYVCIPCAKGFPSSEQLNAHVETHTEEELFIKEEGAYETGSGGAEEEAEDLSAPSAAYTAEPRPFKCSVCEKTYKDPATLRQHEKTHWLTRPFPCNICGKMFTQRGTMTRHMRSHLGLKPFACDECGMRFTRQYRLTEHMRVHSGEKPYECQLCGGKFTQQRNLISHLRMHTSPS

SEQ ID NO: 33860 - protein, 251 aa, Homo sapiens
  MAP TO AC006138.1; EXPRESSED IN HELA, SIGNAL = 0.77
PHGGPGGPVGPRLLGPPPPPRGGDPFWDGPGDPMRGGPMRGGPGPGPGPYHRGRGGRGGNEPPPPPPPFRGARGGRSGGGPPNGRGGPGGGMVGGGGHRPHEGPGGGMGNSSGHRPHEGPGGGMGSGHRPHEGPGGSMGGGGGHRPHEGPGGGISGGSGHRPHEGPGGGMGAGGGHRPHEGPGGSMGGSGGHRPHEGPGHGGPHGHRPHDVPGHRGHDHRGPPPHEHRGHDGPGHGGGGHRGHDGGHSHGG

SEQ ID NO: 33861 - protein, 23 aa, Homo sapiens
  MAP TO AC006138.1; EXPRESSED IN HELA, SIGNAL = 0.77
SPWRPWWASGSTSSGSSTPSPGR

SEQ ID NO: 33862 - protein, 1099 aa, Homo sapiens
  MAP TO AC011547.3; EXPRESSED IN LUNG, SIGNAL = 0.92; EXPRESSED IN HELA, SIGNAL = 1.2; SWISSPROT HIT: P98088, EVALUE 1.00e-03
MGRLCPHGTPVPLMGGLCSHGTPVPLMGRLYPSWDVCVLMGCLCPHGMAVFSWDACTLMGRLCPSWDACVLMGCLYPHGTPVPLMGHLCSHGTPVPLMGCLYPHGMPVPRMGCLHSHGTPVPSWDTCVLMGHLCSHGTPVPSWDACALMGQLCSHGTPVFSWDACALMGCLCSHGTPVPLMGCLCPHGTPVFSWDACAPHGMPVFSWDACAPHGMPVFSWDACAPHGMPVPSWDTCVLMGHLCPHGTPVFSWDACALMGCLCPHGTPVTSWDACVLMGRLCSHGTPVPSWDACVLMGRLCPHGMPVPSWDACALMGRLCSHGTPVPLMGRLCPHGTPVPSWDACVLMGRLCPSWDACALMGRLCPHGTPVFSWDACAPHGTPVFSWDSCALMGRLCSHGTPVPLMGRLCSHGTPVPSWDACVLMGRLCPSWDTCVLMGRLCPHGTPVFSWDACASHGTPVFSWDACALMGRLCPHGTPVFSWDACILMGRLCPHGTPVFSWDTCVLMGCLCPHGMPVPLMGRLCSHGMPVPSWDACTPHGTSVPSWDACAPHGMPVPSWDACVLMGCLYPHGTPVPLMGCLCSHGMPVPRMGRLNSHGTPVPSWDTCVLMGRLCSHGTPVPSWDACVLMGCLCPHGTPVFSWDACALMGRLCPHGTPVFSWDACAPHGTPVPSWDACVLMGRLCPSWDACVLMGRLCPHGTPVPSWDACALMGRLCSHGTPVPSWDACALMGRLCSHGTPVPSWDACALMGRLCSHGTPVFSWDACAPHGTPVFSWDACALMGRLCSHGTPVPLMGRLCSHGTPVPLMGHLCPHGTPVPSWDACVLMGRLCPSWDACALMGRLCSHGTPVPLMGHLCSHGTPVPSWDACVLMGRLCPSWDTCVLMGRLCPHGTPVFSWDACAPHGTPVFSRDACALMGRLCSHGTPVPLMGRLCSHGTPVPLMGHLCPHGTPVPSWDACVLMGRLHSHGTPVPSWDTCVLMGHLCSHGMPVPSWDACTPHGTPVFSWDACTLMGRLYPSWDICALMGCLCPSWDACALMGRLHSHGTPVPSWDACTLMGRLCPSWDACVLMGCLCPSWDACILMGHLCPHGMPVPFMGR

SEQ ID NO: 33863 - protein, 267 aa, Homo sapiens
  MAP TO AC011547.3; EXPRESSED IN LUNG, SIGNAL = 0.92; EXPRESSED IN HELA, SIGNAL = 1.2; SWISSPROT HIT: P98088, EVALUE 4.00e-03
WDVCALMGHLCPSWEACVLMGRLYPSWDACTPHGTSVFSWDACALMGWLCSHGTPVPSWDACAPHGTPVFSWDACTLMGRLCPSWDTCVLMGHLCPSWDACTLMGCLCPAWDACILMGHLCPHGTPVFSWDTCVLMGHLCPHGTPVPSWDNCVLMGRLCSHGTPVPSWDACVLMGRLCPSWDACALMGRLCSHGMPVPLMGCLCSHGTPVPLMGCLCSHGMPVPLMGCLCPHGTPVFSWDTCALMGRLCSHGTPVPSWDACALMGRL

SEQ ID NO: 33864 - protein, 162 aa, Homo sapiens
  MAP TO AL157911.2; EXPRESSED IN HELA, SIGNAL = 0.63
LLVMFIMSAGTAIASYFIPSTVGVVLFMTGFGFLLSLNLSDMGHKIGTKSKDLPSGPEKHFSWKECLFYIIILVLALLETSLLHHFAGFSQISKSNSQAIVGYGLMILLIILWILREIQSVYIIGIFRNPFYPKDVQTVTVFFEKQTRLMKIGIVRRILLTL

SEQ ID NO: 33865 - protein, 318 aa, Homo sapiens
  MAP TO AL008635.1; EXPRESSED IN HELA, SIGNAL = 0.67; SWISSPROT HIT: Q9UGU5, EVALUE 1.00e-100
ISSLESSQKKKKKSSPQSTDTAMDLLKAITSPLAAGSKPSKKTGEKSSGSSSHSESKKEHHRKKVSGSSGELPLEDGGSHKSKKMKPLYVNTETLTLREPDGLKMKLILSPKEKGSSSVDEESFQYPSQQATVKKSSKKSARDEQGALLLGHELQSFLKTARKKHKSSSDAHSSPGPEGCGSDASQFAESHSANLDLSGLEPILVESDSSSGGELEAGELVIDDSYREIKKKKKSKKSKKKKDKEKHKEKRHSKSKRSLGLSAVPVGEVTVTSGPPPSIPYAGAAAPPLPLPGLHTDGHSEKKKKKEEKDKERERGEK

SEQ ID NO: 33866 - protein, 192 aa, Homo sapiens
  MAP TO AC002059.3; EXPRESSED IN HELA, SIGNAL = 0.59; SWISSPROT HIT: O15553, EVALUE 6.00e-36
DMTLDADTANNFLLISDDLRSVRSGCITQNRQDLAERFDVSICILGSPRFTCGRHYWEVDVGTSTEWDLGVCRESVHRKGRIHLTTERGFWTVSLRDGSRLSASTVPLTFLFVDRKLQRVGIFLDMGMQNVSFFDAEGGSHVYTFRSVSAEEPLHLFFAPPSPPNGDKSVLSICPVINPGTTDAPVHPGEAK

SEQ ID NO: 33867 - protein, 215 aa, Homo sapiens
  MAP TO AL021393.1; EXPRESSED IN HELA, SIGNAL = 0.9; SWISSPROT HIT: O43248, EVALUE 4.10e-02
SLSSDYDPFIYRSRSPCRASEAGGSGSSGRGPALCFEGSPPPEELPAVHSHGAGRGEPWPGPASPSGDQVSTCSLEMNYSSNSSLEHRGPNSSTSEVGLEASPGAAPDLRRTWKGGHELPSCACCCEPQPSPAGPSAGAAGSSTLFLGPHLYEGSGPAGGEPQSGSSQGLYGLHPDHLPRTDGVKYEGLPCCFYEEKQVARGGGGGSGCYTEDYS

SEQ ID NO: 33868 - protein, 117 aa, Homo sapiens
  MAP TO AL021393.1; EXPRESSED IN HELA, SIGNAL = 0.9
VAAASPRQLASPSMRPCTSTTTSRASATRSRRGSPHLASHPGARPVPFLRAAVAACSSPPWCTWPRPPTWRAAARPASAAITATARCAVATWPTAQAATAAAAAAPASATVPPVTLW

SEQ ID NO: 33869 - protein, 46 aa, Homo sapiens
  MAP TO AC005663.1; EXPRESSED IN HELA, SIGNAL = 0.92; SWISSPROT HIT: O00192, EVALUE 2.00e-22
RFQAEPYGLEDDTRSLAADDEGGPELEPDYGTATRRRPECGRGLHT

SEQ ID NO: 33870 - protein, 126 aa, Homo sapiens
  MAP TO AL031133.1; EXPRESSED IN HELA, SIGNAL = 0.48; SWISSPROT HIT: P89876, EVALUE 1.80e+00
MAAKTGVFSPLPSKPHLTGPGSGWPRVGGGSQGRCPWALTRVSVAPPSEQHVLAELERQAVLVYTPSRKVHGKRLVCYDDRYIVKVAYEQDGVIVSNDNYRDLQSENPEWKWFIEQRLLMFSFVND

SEQ ID NO: 33871 - protein, 76 aa, Homo sapiens
  MAP TO AL031133.1; EXPRESSED IN HELA, SIGNAL = 0.48
RARTPSGSGSSSRGCSCSPSSTTGRSGWGPDTLGGGGAGGRGRGSGHACYQVEELGVTRSPSPSDRAPPGPHSRRA

SEQ ID NO: 33872 - protein, 190 aa, Homo sapiens
  MAP TO AC005901.1; EXPRESSED IN HELA, SIGNAL = 0.32; SWISSPROT HIT: Q09503, EVALUE 3.40e+00
RQVLRQDTHTPWASVPQETEEAWMGRPEALWSSPQGTQVYLEEGPLAQDLGVGGLSWRDQVHFIHSSSKGFRHSCHVLCTYTCTYHTQTHTNTQRHAHMKMLGGVVSLGNQASCQLPSLSEALRLLSAPSLLGLSLFAPHPMHCRVFSWEGIYSLNVSIFYQIIGSLNGGAGVCFTHCWVSWPSVGVCVW

SEQ ID NO: 33873 - protein, 170 aa, Homo sapiens
  MAP TO AC005618.1; EXPRESSED IN HELA, SIGNAL = 0.8; SWISSPROT HIT: Q9UN66, EVALUE 5.00e-45
YEQLRTFELTLQARDQGSPALSANVSLRVLVGDRNDNAPRVLYPALGPDGSALFDMVPRAAEPGYLVTKVVAVDADSGHNAWLSYHVLQASEPGLFSLGLRTGEVRTARALGDRDAARQRLLVAVRDGGQPPLSATATLHLVFADSLQEVLPDITDRPVPSDPQAELQFY

SEQ ID NO: 33874 - protein, 430 aa, Homo sapiens
  MAP TO AL109910.27; EXPRESSED IN HELA, SIGNAL = 0.61; SWISSPROT HIT: Q63425, EVALUE 4.00e-08
KGAGDVSLAGVDGKKTLQFLFTSPKNQPRQKRLEQPPRAPSISTGHQDSWGDTGRPSTVSRSSIAQIPHPPKTPASQRFSRPQESLHPTLFLGAELLIQICAHTPFPSTQHGTWKTHNKSKSKRNEDLESGFQISTEQEQQSWPASETSLYALEIHPSLQSKHCLNTEPVLWKQDVVNMGEFPFKRLSLPHCKGQCRWIPRVKRLRLPHCKGQCRWIPRVKRLRLPHCKGQCRLIPRVKRLRLPHCKGQCRQIPRVKRLRLPHCKGQCRWIPRVKRLRLPHCKGQCRLIPRVKRLRLPHCKGQCRLIPRVKRLRLPHCKGQCRQIPRVKRLRLPHCKGQCRWIPRVKRLRLPHCKGQCRLIPRVKRLRLPHCKGQCRLIPRVKRLRLPHCKGQCRWIPPVLLNDCISLTAKDGVTGSHMCSVPLTGSHMC

SEQ ID NO: 33875 - protein, 111 aa, Homo sapiens
  MAP TO AL359402.1; EXPRESSED IN HELA, SIGNAL = 0.61; SWISSPROT HIT: Q08274, EVALUE 4.00e-41
RLIDKSRVTCVKWVPGSESLFLVAHSSGNMYLYNVEHTCGTTAPHYQLLKQGESFAVHTCKSKSTRNPLLKWTVGEGALNEFAFSPDGKFLACVSQDGFLRVFNFDSVELH

SEQ ID NO: 33876 - protein, 271 aa, Homo sapiens
  MAP TO AL359402.1; EXPRESSED IN HELA, SIGNAL = 0.61; SWISSPROT HIT: Q08274, EVALUE 4.00e-72
CRVIARGHGHKSWVSVVAFDPYTTSVEEGDPMEFSGSDEDFQDLLHFGRDRANSTQSRLSKRNSTDSRPVSVTYRFGSVGQDTQLCLWDLTEDILFPHQPLSRARTHTNVMNATSPPAGSNGNSVTTPGNSVPPPLPRSNSLPHSAVSNAGSKSSVMDGAIASGVSKFATLSLHDRKERHHEKDHKRNHSMGHISSKSSDKLNLVTKTKTDPAKTLGTPLCPRMEDVPLLEPLICKKIAHERLTVLIFLEDCIVTACQEGFICTWGRPGKV

SEQ ID NO: 33877 - protein, 19 aa, Homo sapiens
  MAP TO AL359402.1; EXPRESSED IN HELA, SIGNAL = 0.61
CTYIMWSTLVAPQPPTTSF

SEQ ID NO: 33878 - protein, 32 aa, Homo sapiens
  MAP TO AL359402.1; EXPRESSED IN HELA, SIGNAL = 0.61
TNRQVTSYLCQMGSRFGKPFPSSPLEWEHVLI

SEQ ID NO: 33879 - protein, 134 aa, Homo sapiens
  MAP TO AC002432.1; EXPRESSED IN HELA, SIGNAL = 6.7; EXPRESSED IN PLACENTA, SIGNAL =  33; SWISSPROT HIT: P30605, EVALUE 2.90e+00
MLPAQEAAKLYHTNYVRNSRAIGVLWAIFTICFAIVNVVCFIQPYWIGDGVDTPQAGYFGLFHYCIGNGFSRELTCRGSFTDFSTLPSGAFKAASFFIGLSMMLIIACIICFTLFFFCNTATVYKICAWMQLTS

SEQ ID NO: 33880 - protein, 39 aa, Homo sapiens
  MAP TO AC002432.1; EXPRESSED IN HELA, SIGNAL = 6.7; EXPRESSED IN PLACENTA, SIGNAL =  33
PSCTTPTMCGTRGPSACCGPSSPSALPSSTWCASSSPTG

SEQ ID NO: 33881 - protein, 33 aa, Homo sapiens
  MAP TO AC007059.1; EXPRESSED IN HELA, SIGNAL = 0.44
GDEMAHIVADAHAVQVAPDVVGQADAVVEAIGA

SEQ ID NO: 33882 - protein, 32 aa, Homo sapiens
  MAP TO AC007059.1; EXPRESSED IN HELA, SIGNAL = 0.44
MLHSMHGNTAGSSSSSSSGLATPSATSSSSSH

SEQ ID NO: 33883 - protein, 185 aa, Homo sapiens
  MAP TO AL133243.1; EXPRESSED IN HELA, SIGNAL = 0.74; SWISSPROT HIT: Q9NR09, EVALUE 2.00e-85
DGFTVPQIIEMELDSQEQLLLQDPPVTYIQQFADAAANLTSPDSEKWNSVFPKPGTLVQCLRLPKFAEEENLCIDSITPCADGIHLLVGLRTCPVESLSAINQVEALNNLNKLNSALCNRRKGELESNLAVVNGANISVIQHESPADVQTPLIIQPEQRNVSGGYLVLYKMNYATRIVTLEEEPI

SEQ ID NO: 33884 - protein, 311 aa, Homo sapiens
  MAP TO AL022329.9; EXPRESSED IN HELA, SIGNAL = 0.29; EXPRESSED IN LUNG, SIGNAL = 2.4; SWISSPROT HIT: P16884, EVALUE 2.00e-06
IPEISISQPNSKSSSGTRSGSQQISQDDQSSSPGSSDILGKESEGSRSPDPEQMTSINGEKAQELGSSATPTKKTVPFKRGVRRGDVLLMVAKLDPDSAKPEKTHPHDAPPCKTSPPATDTGKEKKGETSRTPCGSQASTEILAPKAEKTRTGGLGDPGQGTVALKKGEEGQSIVGKGLGTPKTTELKEAEPQGKDRQGTRPQAQGPGEGVRPGKAEKEGAEPTNTVEKGNVSKDVGSEGKHVRPQIPGRKWGGFLGRRSKWDGPQNKKDKEGVLLSKAEKTGEPQTQMEKTSQVQGELGDDLRMGEKAGE

SEQ ID NO: 33885 - protein, 284 aa, Homo sapiens
  MAP TO AL031667.17; EXPRESSED IN HELA, SIGNAL = 0.83; SWISSPROT HIT: P10716, EVALUE 4.00e-05
TLAGELSHDSASPGRSARPLVQTELAVLEQRLVSLETSCTPSTTSAILDSLVAEVKAWQSRSEALLRQVASHAALLQQLNGTVAEVQGQLAEGTGSSLQGEITLLKVNLNSVSKSLTGLSDSVSQYSDAFLAANTSLDERERKVEAEVQAIQEQVSSQGSRLQAGHRQVLNLRGELEQLKAGVAKVASGLSRCQDTAQKLQHTVGHFDQRVAQVEGACRRLGLLAAGLDSLPTEPLRPREGLWSHVDQLNRTLAQHTQDIARLRDDLLDCQAQLAEQVRPGQAN

SEQ ID NO: 33886 - protein, 156 aa, Homo sapiens
  MAP TO AC009288.8; EXPRESSED IN PLACENTA, SIGNAL = 1.8; EXPRESSED IN HELA, SIGNAL = 2.5; EXPRESSED IN LUNG, SIGNAL = 2.1; SWISSPROT HIT: Q9Y2N3, EVALUE 6.00e-09
MDSLWGPGAGSHPFGVHNSRLSPDLCPGKIVLRALKESGAGMPEQDKDPRVQENPGDQRRVPEVTGDAPSAFRPLRDNGGLSPFVPGPGPLQTDLHAQRSEIRYNQTSQTSWTSSCTNRNAISSSYSSTGGLPGLKRRRGPASSHCQLTLSSSKTV

SEQ ID NO: 33887 - protein, 252 aa, Homo sapiens
  MAP TO U47924.1; EXPRESSED IN HELA, SIGNAL = 0.48; SWISSPROT HIT: Q25322, EVALUE 7.00e-06
ISAKQQKHKPLELLLCFLAGTHILMAAVPLTTFAVVQLRRQASSDYDWNESICKVFVSTYYTLALATCFTVASLSYHRMWMVRWPVNYRLSNAKKQALHAVMGIWMVSFILSTLPSIGWHNNGERYYARGCQFIVSKIGLGFGVCFSLLLLGGIVMGLVCVAITFYQTLWARPRRARQARRVGGGGGTKAGGPGALGTRPAFEVPAIVVEDARGKRRSSLDGSESAKTSLQVTNLVSAIVFLYDSLTGVPIL

SEQ ID NO: 33888 - protein, 73 aa, Homo sapiens
  MAP TO U47924.1; EXPRESSED IN HELA, SIGNAL = 0.48; SWISSPROT HIT: P07548, EVALUE 5.30e+00
GLPALQRIVLAGLWAPGAAGQCLDHPQHLGQAAEAQATGAAALLPSGHTHTHGSCAPHHLCRGAAASSGFLRL

SEQ ID NO: 33889 - protein, 166 aa, Homo sapiens
  MAP TO AL121907.2; EXPRESSED IN HELA, SIGNAL = 1.5; SWISSPROT HIT: P48998, EVALUE 3.40e+00
MVELFQQVPEQQELDLGLSCAHLLHALELPGVDELEQGARQHQRVLVAQGQVLGQDLDVVGALTQQLHAGVVALEQVRTQVRGQELTQGIAALGVGLPRLWFQQLLVICLLLVQEGLGIAQLHLVQAQACHMGAHYPGAGGRAGCQLPGRLASPGLWHVRGMDSAH

SEQ ID NO: 33890 - protein, 140 aa, Homo sapiens
  MAP TO AC008764.4; EXPRESSED IN HELA, SIGNAL = 0.55; SWISSPROT HIT: P52177, EVALUE 9.00e-03
MAAAAVGAGHGAGGPGAASSSGGAREGARVAALCLLWYALSAGGNVVNKVILSAFPFPVTVSLCHILALCAGLPPLLRAWRVPPAPPVSGPGPSPHPSSGPLLPPRFYPRYVLPLAFGKYFASVSAHVSIWKVPVSYAHT

SEQ ID NO: 33891 - protein, 39 aa, Homo sapiens
  MAP TO AC008764.4; EXPRESSED IN HELA, SIGNAL = 0.55
WRRPRWARATARGARAQRAAVVGRARARGWRRCACCGTR

SEQ ID NO: 33892 - protein, 378 aa, Homo sapiens
  MAP TO AP001751.1; EXPRESSED IN PLACENTA, SIGNAL = 5.6; EXPRESSED IN HELA, SIGNAL = 2.7; EXPRESSED IN LUNG, SIGNAL = 3.6
HHHHQHHHHHHHHHHHHHHHHHQHHHHHHHHHHHHHHHHHHHHHHHHHHHHQHHHHHHHHHHHDHHHHHHHHHHHHHHHQHHHQPHHHHHHHHHHHHHHHHHHHHHHYHHHQHHHHHHHHHHHHHHHQHHHHHHHHHHHHHHHHHHHHHHHHHHHQHRHHHHHHHHHHDHHHHHHHHHHHHQHHHDNHHHHHHHHHHHHHHHHHHHHHHHHHHHHHHHHHHHHHHHHHHHHHHHHHHHHHHHHHHHHHHHHHHHHHHHHHHHQHQHHHHHHHHHHHQQHHHHHHHHHQHHHHHHQHHHHHHHHHHHHQHHHHHHHHHHHHDHHHHHHHHHHHHQHHHNNHHHQHHHHHHHHHHHHHYHHHHHHHHHHHHHHHHHHHHH

SEQ ID NO: 33893 - protein, 181 aa, Homo sapiens
  MAP TO AC002544.1; EXPRESSED IN LUNG, SIGNAL = 1.8; EXPRESSED IN HELA, SIGNAL = 0.43; SWISSPROT HIT: P35001, EVALUE 3.60e+00
TTQDAGCGTEEGEASVSENQELDGSTGADAGPCPSLGEAYARETEDEEAEADRTSRRGWRLQAVAVGLPDREDAQTGSVAAGIMGGDVVPHISAAGAGEALEGALGQGWDSKEKEEAAAGEHAGGQEFGLEGSAEEEVTGRGSQVEAFESREGGPWGGRVEAEESAGAEDSCGLDPAGSQT

SEQ ID NO: 33894 - protein, 392 aa, Homo sapiens
  MAP TO AC004621.1; EXPRESSED IN HELA, SIGNAL = 1.3; SWISSPROT HIT: P15771, EVALUE 1.30e-01
MHRNKSSLLFKESEEIRTPNCNCKYCSHPLLGQNVENISQQEREDIQNSSKELLGISDECQMISPSDCQEENAVDVKQYRDKLRTCFDAKLETVVCTGSVPVDKCALSESGLESTEETWQSEKLLDSDSHTGKAMRSTGMVVEKKPPDKIVPASFSCEAAQTKVTFLIGDSMSPDSDTELRSQAVVDQITRHHTKPLKEERGAIDQHQETKQTTKDQSGESDTQNMVSEEPCELPCWNHSDPESMSLFDEYFNDDSIETRTIDDVPFKTSTDSKDHCCMLEFSKILCTKNNKQNNEFCKCIETVPQDSCKTCFPQQDQRDTLSILVPHGDKESSDKKIAVGTEWDIPRNESSDSALGDSESEDTGHDMTRQVSSYYGGEQEDWAEEDEIPFP

SEQ ID NO: 33895 - protein, 277 aa, Homo sapiens
  MAP TO AC005768.16; EXPRESSED IN HELA, SIGNAL = 0.85; SWISSPROT HIT: Q9YID8, EVALUE 1.60e+00
RLHRNREDYVERSAEFADGLLSKALKDIQSGALDINKAGILYGIPQKTLLLHLEALPAGKPASFKNKTRDFHDSYSYKDSKETCAVLQKVALWARAQAERTEKSKLNLLETSEIKFPTASTYLHQLTLQKMVTQFKEKNESLQYETSNPTVQLKIPQLRVSSVSKSQPDGSGLLDVMYQVSKTSSVLEGSALQKLKNILPKQNKIECSGPVTHSSVDSYFLHGDLSPLCLNSKNGTVDGTSENTEDGLDRKDSKQPRKKRGRYRQYDHEIMEEAIAM

SEQ ID NO: 33896 - protein, 353 aa, Homo sapiens
  MAP TO Z93016.1; EXPRESSED IN HELA, SIGNAL = 1.3; SWISSPROT HIT: P15387, EVALUE 5.00e-59
QRALLVSAGRSTETFVSEFPGPDTGIRWRRSDEALRVNVGGVRRQLSARALARFPGTRLGRLQAAASEEQARRLCDDYDEAAREFYFDRHPGFFLSLLHFYRTGHLHVLDELCVFAFGQEADYWGLGENALAACCRARYLERRLTQPHAWDEDSDTPSSVDPCPDEISDVQRELARYGAARCGRLRRRLWLTMENPGYSLPSKLFSCVSISVVLASIAAMCIHSLPEYQAREAAAAVAAVAAGRSPEGVRDDPVLRRLEYFCIAWFSFEVSSRLLLAPSTRNFFCHPLNLIDIVSVLPFYLTLLAGVALGDQGGKEFGHLGKVVQVFRLMRIFRVLKLARHSTGLRSLGATLK

SEQ ID NO: 33897 - protein, 172 aa, Homo sapiens
  MAP TO AC003035.1; EXPRESSED IN HELA, SIGNAL = 0.67; SWISSPROT HIT: Q14687, EVALUE 7.20e-01
ASTSKATRPWYSHPVYARYWQHYHQAMAWMQSHHNAYRKAVESCFNLPWYLPSALLPQSSYDNEAAYPQSFYDHHVAWQDYPCSSSHFRRSGQHPRYSSRIQASTKEDQALSKEEEMETESDAEVECDLSNMEITEELRQYFAETERHREERRKFRPLSLHASFPCPAFYIF

SEQ ID NO: 33898 - protein, 401 aa, Homo sapiens
  MAP TO U62631.1; EXPRESSED IN HELA, SIGNAL = 1.4; SWISSPROT HIT: O14843, EVALUE 0.00e+00
MLRKTGRLTPPGRHPETRGVGVVTSCPFRGDAAGQRPLGPPLPTPCYSLSPVATTMDTGPDQSYFSGNHWFVFSVYLLTFLVGLPLNLLALVVFVGKLQRRPVAVDVLLLNLTASDLLLLLFLPFRMVEAANGMHWPLPFILCPLSGFIFFTTIYLTALFLAAVSIERFLSVAHPLWYKTRPRLGQAGLVSVACWLLASAHCSVVYVIEFSGDISHSQGTNGTCYLEFRKDQLAILLPVRLEMAVVLFVVPLIITSYCYSRLVWILGRGGSHRRQRRVAGLLAATLLNFLVCFGPYNVSHVVGYICGESPAWRIYVTLLSTLNSCVDPFVYYFSSSGFQADFHELLRRLCGLWGQWQQESSMELKEQKGGEEQRADRPAERKTSEHSQGCGTGGQVACAES

SEQ ID NO: 33899 - protein, 56 aa, Homo sapiens
  MAP TO U62631.1; EXPRESSED IN HELA, SIGNAL = 1.4
WIQAPTSPTSPAITGSSSRCTFSLSWWGSPSTCWPWWSSWASCSAARWPWTCSCST

SEQ ID NO: 33900 - protein, 227 aa, Homo sapiens
  MAP TO AL158091.7; EXPRESSED IN HELA, SIGNAL = 0.6; SWISSPROT HIT: O95429, EVALUE 6.60e-01
RRGDDAGPGLGDTWKGWGSLGSWPKSQFGASWPLHLASPACVPGGPGAQPRGPRMCFPTGVSREDSDSTRGPKSTGGHRSCPFFLAPPSRGTIENPSGRRPVCPCTFSPPRLHRTCSSGGGWWGRAASRQRSGQKDWRPSPPSLRPKTEGGAPSLCQQGWGGRWQPSQGPWWGPRRAGCAAHPQPFLPGVGGSQLPGGWAESRHLPGSGRLCCELRDRGSFKALDLG

SEQ ID NO: 33901 - protein, 407 aa, Homo sapiens
  MAP TO AL118505.13; EXPRESSED IN HELA, SIGNAL = 0.36; SWISSPROT HIT: Q02858, EVALUE 1.00e-06
AADTMCAPAAGSSGPFSASLSLSQLPGVCQSDQSTTLGASHPPCFNRSTYAQGTTVAPSAAPATRPAGDQQSVSKAPNVGSRTIAAWPHSDAREGTAPSTTNSVAGHSNSSVFPRAASTTRTQHRGEHAPELVLEPDISAASTPLASKLLGPFPTSWDRSISSPQPGQRTHATPQAPNPSLSEGEIPVLLLDDYSEEEEGRKEEVGTPHQDVPCDYHPCKHLQTPCAELQRRWRCRCPGLSGEDTIPDPPRLQGVTETTDTSALVHWCAPNSVVHGYQIRYSAEGWAGNQSVVGVIYATARQHPLYGLSPGTTYRVCVLAANRAGLSQPRSSGWRSPCAAFTTKPSFALLLSGLCAASGLLLASTVVLSACLCRRGQTLGLQRCDTHLVAYKNPAFDDYPLGLQTVS

SEQ ID NO: 33902 - protein, 79 aa, Homo sapiens
  MAP TO AL118505.13; EXPRESSED IN HELA, SIGNAL = 0.36
CARQLRDPAAPSQPPCHSPSCPECASPTKAPLSGLHTHLASTAPPTHRVPPSRPAQPPPPGLRETSRVSPRPLTWALAR

SEQ ID NO: 33903 - protein, 36 aa, Homo sapiens
  MAP TO AC022325.3; EXPRESSED IN HELA, SIGNAL = 2.9; EXPRESSED IN LUNG, SIGNAL = 1.3
MLDANRDSVMRFKEKSCLFNIKGQGDAANADAEAAT

SEQ ID NO: 33904 - protein, 401 aa, Homo sapiens
  MAP TO AP001067.1; EXPRESSED IN HELA, SIGNAL = 0.37
MSVCSSDLSYSSRVCLPGSCDSCSDSWQVDDCPESCCEPPCCAPSCCAPAPCLSLVCTPVSRVSSPCCPVTCEPSPCQSGCTSSCTPSCCQQSSCQLACCASSPCQQACCVPVCCKTVCCKPVCCVPVCCGDSSCCQQSSCQSACCTSSPCQQACCVPICCKPVCSGISSSCCQQSSCVSCVSSPCCQAVCEPSPCQSGCISSCTPSCCQQSSCQPACCTSSSCQQACCVPVCCKTVCCKPVCSEDSSSCCQQSSCQPACCTSSPCQQACCVPVCCKPVCCKPVCSVPICSGASSLCCQQSSCQPACCTSSQSQQGCCVPVCCKPVSCVPVCSGASSSCCQQSSCQPACCTTSCCRPSSSVSLLCRPVCRPACCVPVPSCCAPTSSCQPSCCRPASCVSLL

SEQ ID NO: 33905 - protein, 69 aa, Homo sapiens
  MAP TO AC005838.1; EXPRESSED IN HELA, SIGNAL = 0.45; SWISSPROT HIT: P47990, EVALUE 1.10e-01
VNAEFVLLTVKEEKEHQEAKMKEYQARESTGVVDPGKASKAAWIRKIKGLPIDNFTKQGKTAAPELGQN

SEQ ID NO: 33906 - protein, 260 aa, Homo sapiens
  MAP TO AC011448.1; EXPRESSED IN HELA, SIGNAL = 0.49; SWISSPROT HIT: P57059, EVALUE 2.00e-40
MSGDKLLSELGYKLGRTIGEGSYSKVKVATSKKYKGTVAIKVVDRRRAPPDFVNKFLPRELSILRGVRHPHIVHVFEFIEVCNGKLYIVMEAAATDLLQAVQRNGRIPGVQARDLFAQIAGAVRYLHDHHLVHRDLKCENVLLSPDERRVKLTDFGFGRQAHGYPDLSTTYCGSAAYASPEVLLGIPYDPKKYDVWSMGVVLYVMVTGCMPFDDSDIAGLPRRQKRGVLYPEGLELSERCKALIAELLQFSPSARPSAGQ

SEQ ID NO: 33907 - protein, 340 aa, Homo sapiens
  MAP TO AF146367.1; EXPRESSED IN HELA, SIGNAL = 0.77; SWISSPROT HIT: P52742, EVALUE 0.00e+00
HQRIHTGEKPYVCSVCGKAFSQSSVLSKHRRIHTGEKPYECNECGKAFRVSSDLAQHHKIHTGEKPHECLECRKAFTQLSHLIQHQRIHTGERPYVCPLCGKAFNHSTVLRSHQRVHTGEKPHRCNECGKTFSVKRTLLQHQRIHTGEKPYTCSECGKAFSDRSVLIQHHNVHTGEKPYECSECGKTFSHRSTLMNHERIHTEEKPYACYECGKAFVQHSHLIQHQRVHTGEKPYVCGECGHAFSARRSLIQHERIHTGEKPFQCTECGKAFSLKATLIVHLRTHTGEKPYECNSCGKAFSQYSVLIQHQRIHTGEKPYECGECGRAFNQHGHLIQHQKV

SEQ ID NO: 33908 - protein, 34 aa, Homo sapiens
  MAP TO AF146367.1; EXPRESSED IN HELA, SIGNAL = 0.77
VGKPSTIALFCGATRGYTLGRSLTGAMSVGKPSV

SEQ ID NO: 33909 - protein, 260 aa, Homo sapiens
  MAP TO AL021366.1; EXPRESSED IN HELA, SIGNAL = 1.2; SWISSPROT HIT: P79955, EVALUE 6.00e-53
RRLQTSEAALSSSQAEVASLRQETVAQAALLTEREERLHGLEMERRRLHNQLQELKGNIRVFCRVRPVLPGEPTPPPGLLLFPSGPGGPSDPPTRLSLSRSDERRGTLSGAPAPPTRHDFSFDRVFPPGSGQDEVFEEIAMLVQSALDGYPVCIFAYGQTGSGKTFTMEGGPGGDPQLEGLIPRALRHLFSVAQELSGQGWTYSFVASYVEIYNETVRDLLATGTRKGQGGECEIRRAGPGSEELTVTNARYVPVSCEKE

SEQ ID NO: 33910 - protein, 30 aa, Homo sapiens
  MAP TO AL021366.1; EXPRESSED IN HELA, SIGNAL = 1.2
GGCRHQKQPCQAAKQRWHLCGRRLWPRQPY

SEQ ID NO: 33911 - protein, 683 aa, Homo sapiens
  MAP TO AC025436.2; EXPRESSED IN HELA, SIGNAL = 0.73; SWISSPROT HIT: Q9Y5F3, EVALUE 0.00e+00
MAGTRRKSLQNRQVGSLLIFLCISVGDATTIRYSVAEEMESGSFVANVAKDLGLEVGKLAARGARLVSEGNKMHFRLHRKTGDLFVKEKLDRESLCGKADPCVLHFEVVLVEPLQSFRAEVRVFDINDNAPVFLNKEPLLKIPESTPLGSRFPLQSAQDLDVGLNGLQNYTLSANGYFHLHTRFCSHGPKYAELVLNKPLDREEQPEVNLTITAVDGGSPPKSGTAHIHVVVLDVNDHVPQFSRLVYRAQVSENSPNGSLVATVTAVDLDEGTNKAITYSLAQNPEAILKTFQIDPQNGEVRLRGPLDFEAIETYDIDIQATDGGGLSAHSKVLVEVVDVNDNPPEVMVSSVSSPLPEDSPPQTVVALFTIRDRDIRVGGKVTCFLREDLPFVIKPTFGNSYSLVTDRSLDREEVSGYNITIVAMDTGPPSLSAETMIEVLISDVNDNPPIFREDSYILTVRENNSPAVFIGKVHAEDLDLGENAQITYSLLPPKNGDLSVFAYISINSGNGKLYALRTMDYEAIQDFQFVVKATDGGFLSLSSQVTVRVVVLDDNDNRPMILYPLQNGTLPCNDLVPRSAEAGYLVTKVVAVDGDSGQNSWLSYHLLKATDLGLFSVQRQNGEIHTLRQISERDPMMQKLIILVQDHGQPALSTTVSLNILLVDGFSEPYLQFQDPTKHSRK

SEQ ID NO: 33912 - protein, 47 aa, Homo sapiens
  MAP TO AC025436.2; EXPRESSED IN HELA, SIGNAL = 0.73; SWISSPROT HIT: P19568, EVALUE 1.70e+00
WRVRAENLCKTGKWDLFSFFCAYLWGMRQLSAIQWQRKWRAARLWPT

SEQ ID NO: 33913 - protein, 48 aa, Homo sapiens
  MAP TO AC025436.2; EXPRESSED IN HELA, SIGNAL = 0.73; SWISSPROT HIT: P21590, EVALUE 9.70e-01
GGYAQKIFAKQASGISSHFSVHICGGCDNYPLFSGRGNGERLVCGQRS

SEQ ID NO: 33914 - protein, 30 aa, Homo sapiens
  MAP TO AL136125.2; EXPRESSED IN HELA, SIGNAL = 0.39
VAYPVLRARHGVHAGRCHDDRHLGAPEHPV

SEQ ID NO: 33915 - protein, 236 aa, Homo sapiens
  MAP TO AL009182.13; EXPRESSED IN HELA, SIGNAL = 0.41; SWISSPROT HIT: Q12872, EVALUE 7.40e-02
QPRSKSEMLSRKNFATGVPAVSMDELAAFADSYGQRPRRADGNSHEARGGSRFERSESRAHSGFYQDDSLEEYYGQRSRSREPLTDADRGWAFSPARRRPAEDAHLPRLVSRTPGTAPKYDHSYLGSARERQARPEGASRGGSLETPSKRSAQLGPRSASYYAWSPPGTYKAGSSQDDQEDASDDALPPYSELELTRGPSYRGRDLPYHSNSEKKRKKEPAKKTVRLRLPPLLRGD

SEQ ID NO: 33916 - protein, 49 aa, Homo sapiens
  MAP TO AC007868.2; EXPRESSED IN HELA, SIGNAL = 0.8; SWISSPROT HIT: Q04652, EVALUE 6.30e+00
SEECPAHLLEDPLCADVILVLQERVRIFAHKIYLSTSSSKFYDLFLMDL

SEQ ID NO: 33917 - protein, 105 aa, Homo sapiens
  MAP TO D87022.1; EXPRESSED IN HELA, SIGNAL = 0.81; SWISSPROT HIT: P04211, EVALUE 2.00e-27
VDSQTVVTQEPSFSVSPGGTVTLTCGLSSGSVSTSYYPSWYQQTPGQAPRTLIYSTNTRSSGVPDRFSGSILGNKAALTITGAQADDESDYYCVLYMGSGISTVI

SEQ ID NO: 33918 - protein, 82 aa, Homo sapiens
  MAP TO D87022.1; EXPRESSED IN HELA, SIGNAL = 0.81; SWISSPROT HIT: P98154, EVALUE 6.70e+00
GLDDASPRTPCLWIRSGEGTLSLGDHRKQGPGYSHPHDHNCVSPVRFRSGFSDCGDPGAIVLSVPWRDSHTHLWLELWLSLY

SEQ ID NO: 33919 - protein, 164 aa, Homo sapiens
  MAP TO Z68869.1; EXPRESSED IN HELA, SIGNAL = 0.59; SWISSPROT HIT: P41586, EVALUE 5.30e+00
CCPESAIWFTYCVIFWHFTAVRCPESAVWFTYCVIFWHFTAVRCPESAVWFTYCIIFWHFTAVRCPESAVWFMYCVIFWHFTAVRCPESAVWFTYCVIFWHFTAVCCPQSAVWFTYCVIFWHFTAVRCPESAVWFMYCVIFWHFTAVRCPESAVWFMYCVIFWH

SEQ ID NO: 33920 - protein, 123 aa, Homo sapiens
  MAP TO AC009948.2; EXPRESSED IN HELA, SIGNAL = 0.21; SWISSPROT HIT: Q05623, EVALUE 3.00e-14
MQPKGTEKWSIVAESKVCNAVVTGLSSGQEYQFRVKAYNEKGKSDPRVLGVPVIAKDLTIQPSLKLPFNTYSIQAGEDLKIEIPVIGRPRPNISWVKDGEPLKQTTRVNVEETATSTVLHIKE

SEQ ID NO: 33921 - protein, 42 aa, Homo sapiens; identical to SEQ ID NO: 31963
  MAP TO AL163300.2; EXPRESSED IN HELA, SIGNAL = 0.34

SEQ ID NO: 33922 - protein, 194 aa, Homo sapiens
  MAP TO AC009948.2; EXPRESSED IN HELA, SIGNAL = 0.5; SWISSPROT HIT: Q00872, EVALUE 9.00e-24
YPDYELDERYQEGIFVRQGGVIRLTIPIKGKPFPICKWTKEGQDISKRAMIATSETHTELVIKEADRGDSGTYDLVLENKCGKKAVYIKVRVIGSPNSPEGPLEYDDIQVRSVRVSWRPPADDGGADILGYILERREVPKAAWYTIDSRVRGTSLVVKGLKENVEYHFRVSAENQFGISKPLKSEEPVTPKTPL

SEQ ID NO: 33923 - protein, 153 aa, Homo sapiens
  MAP TO AC004736.1; EXPRESSED IN HELA, SIGNAL = 0.28; SWISSPROT HIT: Q9HR45, EVALUE 2.80e-01
GRHGDHGPPEADGDVLKVRVLTGAGVIGLCPYPLGVVDHGGEDQHAQGQEDDEQQELVGAGSERVAQDPQAHKVAGQLKDAQDAHEADDAQEAQHVLGCLGGQAAQPHLQVEGQDGHKVNDVERVLDELYLVGAEDDTHEELEGEPDHTDALD

SEQ ID NO: 33924 - protein, 183 aa, Homo sapiens
  MAP TO AC009516.17; EXPRESSED IN HELA, SIGNAL = 0.26; SWISSPROT HIT: Q53192, EVALUE 3.90e+00
VQLPKKPLVPEMRPACKPGRVPHPPSTCGSSALQGQRRNKRHPQPFGHFLDFLTESQVLDSLETVVEKATERMAAMKTEAGVPLVEVQDPVEVPSGRRRAHARPSLSTVHRHRVRPTLCTGHPNNYPSSSSSMSNCHSSLMAGCLGSHSRDSDLGAQGSLPPVRDKLLLEKNLKRLLQLEREG

SEQ ID NO: 33925 - protein, 50 aa, Homo sapiens
  MAP TO AC009516.17; EXPRESSED IN HELA, SIGNAL = 0.26; SWISSPROT HIT: Q24998, EVALUE 4.30e-01
QEATGPRNAASLQAGPCATPTIHMWQLSTPGPTPKQEAPSALWPLSGFPN

SEQ ID NO: 33926 - protein, 348 aa, Homo sapiens
  MAP TO AC002085.2; EXPRESSED IN HELA, SIGNAL = 1.1; SWISSPROT HIT: P47883, EVALUE 0.00e+00
MDLGNSGNDSVVTKFVLLGLTETAALQPILFVIFLLAYVTTIGGTLSILAAILMETKLHSPMYFFLGNLSLPDVGCVSVTVPAMLSHFISNDRSIPYKACLSELFFFHLLAGADCFLLTIMAYDRYLAICQSLTYSSRMSWGIQQALVGMSCVFSFTNALTQTVALSPLNFCGPNVINHFYCDLPQPFQLSCASVHLNGQLLFVAAAFMGVAPLVLITVSYAHVAAAVLRIRSAEGKKKAFSTCSSHLTVVGIFYGTGVFSYTRLGSVESSDKDKGIGILNTVISPMLNPLIYWTSLLDVGCISHCSSDAGVSPGPPVQSSLCCLQFTALLSPPPGWGGLSPLNSHGL

SEQ ID NO: 33927 - protein, 185 aa, Homo sapiens
  MAP TO AL022101.1; EXPRESSED IN HELA, SIGNAL = 0.63; SWISSPROT HIT: O60809, EVALUE 5.00e-96
YLKNPLGAFIFSDAYLTDRDMECLSQYPSLSQLKELRLIHILMWTTHLEPLGVLLEKVAATLKTLVLKDCRIQDPQLRVLLPALSHCSQLTTFNFHGNETSMNALKDLLRHTGGLSKLGLELYPAPLESLDYKGHVNWEILTPIRAELMRTLREVRQPKRIFFGPVPCPNCGSWPSEKVDFHLCS

SEQ ID NO: 33928 - protein, 335 aa, Homo sapiens
  MAP TO AL137039.1; EXPRESSED IN HELA, SIGNAL = 0.69; SWISSPROT HIT: P70478, EVALUE 3.20e-01
NMKELKEARPRKDNRRPDLEIYKPGLSRLRNKPKIKEPPGSEEFKDEIVNDRDCSAVENGTQPVKDVCKELNNQEQNGPIDPENNRGQESFPRTAGQEDRSLKIIKRTKKPDLQIYQPGRRLQTVSKESASRVEEEEVLNQVEQLRVEEDECRGNVAKEEVANKPDRAEIEKSPGGGRVGAAKGEKGKRMGKGEGVRETHDDPARGRPGSAKRYSRSDKRRNRYRTRSTSSAGSNNSAEGAGLTDNGCRRRRQDRTKERPRLKKQVSVSSTDSLDEDRIDEPDGLGPRRSSERKRHLERNWSGRGEGEQKNSAKEYRGTLRVTFDAEAMNKESPM

SEQ ID NO: 33929 - protein, 61 aa, Homo sapiens
  MAP TO AP001067.1; EXPRESSED IN HELA, SIGNAL = 0.84
WGGRGGKHRRPCGSSWAGRRRQRHHRRGRARSRWTCTQGGRGGTRRRRICSRRRCSKPAGS

SEQ ID NO: 33930 - protein, 205 aa, Homo sapiens
  MAP TO AL358293.1; EXPRESSED IN HELA, SIGNAL = 0.49; SWISSPROT HIT: Q9WTL3, EVALUE 2.70e+00
EEDFNNQVDRMTHSVDTTQPFFPANSASTQWAHEQSGHGGRDEGFAWAHQYGLPLTKADLATANAECPISHQQRPTLRPQYGTIPQGDQPATWWLVDYIGPLHGKGRGLFSLEQIFTPDMSLSILHAMILPRLPPMDSRNALSTVMVFHTALPLTKALTLWLKKCSSGLMVTGFTSLTMFSIILKHLDASGCALCIEGKTPRCAI

SEQ ID NO: 33931 - protein, 243 aa, Homo sapiens
  MAP TO Z97630.11; EXPRESSED IN HELA, SIGNAL = 2.9; EXPRESSED IN LUNG, SIGNAL = 2.1; SWISSPROT HIT: O60755, EVALUE 8.00e-96
YLAVRHPLRSRALRTPRNARAAVGLVWLLAALFSAPYLSYYGTVRYGALELCVPAWEDARRRALDVATFAAGYLLPVAVVSLAYGRTLRFLWAAVGPAGAAAAEARRRATGRAGRAMLAVAALYALCWGPHHALILCFWYGRFAFSPATYACRLASHCLAYANSCLNPLVYALASRHFRARFRRLWPCGRRRRHRARRALRRVRPASSGPPGCPGDARPSGRLLAGGGQGPEPREGPVHGGEA

SEQ ID NO: 33932 - protein, 162 aa, Homo sapiens
  MAP TO Z97630.11; EXPRESSED IN HELA, SIGNAL = 2.9; EXPRESSED IN LUNG, SIGNAL = 2.1
GRAPPRPGRGHLRCRLPAARGCGEPGLRAHAALPVGRRGSRGRGGGRGAAEGDGPRGARHAGGGRALRALLGSAPRAHPVLLVRPLRLQPGHLRLPPGLTLPGLRQLLPQPARLRARLAPLPRALPPPVAVRPPTPPPCPPRLASRPPRVLGPTRLPRRRPA

SEQ ID NO: 33933 - protein, 203 aa, Homo sapiens
  MAP TO AC005031.1; EXPRESSED IN HELA, SIGNAL = 1.6; EXPRESSED IN LUNG, SIGNAL = 0.95; SWISSPROT HIT: Q13075, EVALUE 1.00e-112
MAQGEAQWFQEAKNLNEQLRAAYTSASFRHMSLLDISSDLATDHLLGCDLSIASKHISKPVQEPLVLPEVFGNLNSVMCVEGEAGSGKTVLLKKIAFLWASGCCPLLNRFQLVFYLSLSSTRPDEGLASIICDQLLEKEGSVTEMCMRNIIQQLKNQVLFLLDDYKEICSIPQVIGKLIQKNHLSRTCLLIAVRTNRARDIRR

SEQ ID NO: 33934 - protein, 244 aa, Homo sapiens
  MAP TO AL133245.2; EXPRESSED IN HELA, SIGNAL = 0.5; SWISSPROT HIT: Q9NR09, EVALUE 1.00e-121
DGFTVPQIIEMELDSQEQLLLQDPPVTYIQQFADAAANLTSPDSEKWNSVFPKPGTLVQCLRLPKFAEEENLCIDSITPCADGIHLLVGLRTCPVESLSAINQVEALNNLNKLNSALCNRRKGELESNLAVVNGANISVIQHESPADVQTPLIIQPEQRNVSGGYLVLYKMNYATRIVTLEEEPIKIQHIKDPQDTITSLILLPPDILDNREDDCEEPIEDMQLTSKNGFEREKTSDISTLGHL

SEQ ID NO: 33935 - protein, 92 aa, Homo sapiens
  MAP TO AC022882.3; EXPRESSED IN HELA, SIGNAL = 1.3; SWISSPROT HIT: Q13606, EVALUE 2.00e-27
NLGLVVLVIEDSWLHNPMYYFLSVLSFLDACYSTVVTPKMLVNFLAKNKSISFIGCATQMLLFVTFGTTECFLLAAMAYDHYVAIYNPLLYS

SEQ ID NO: 33936 - protein, 280 aa, Homo sapiens
  MAP TO AC004890.2; EXPRESSED IN HELA, SIGNAL = 1.4; SWISSPROT HIT: Q9UDV7, EVALUE 1.00e-105
SPGDSLLMVKNPPPAPPQPQPQPQPPQPQLQSQPQPQSLPPIAVAENPGGPPSRGLLDDGFQVLPGERGSGEAPPGGDRSTGGGGGDGGGGGGGAEAGTGAGGGCGSCCPGGLRRSLLLHGARSKPYSCPECGKSFGVRKSLIIHHRSHTKERPYECAECEKSFNCHSGLIRHQMTHRGERPYKCSECEKTYSRKEHLQNHQRLHTGERPFQCALCGKSFIRKQNLLKHQRIHTGERPYTCGECGKSFRYKESLKDHLRVHSGGPGPGAPRQLPPPPERD

SEQ ID NO: 33937 - protein, 52 aa, Homo sapiens
  MAP TO AC002544.1; EXPRESSED IN LUNG, SIGNAL = 1.4; EXPRESSED IN HELA, SIGNAL = 0.9; SWISSPROT HIT: Q12397, EVALUE 6.20e+00
VQAEEAQEERGSSRDPVAELPSDGEAEGTADLEATPEARPEEELTGEESEAA

SEQ ID NO: 33938 - protein, 55 aa, Homo sapiens
  MAP TO AC002544.1; EXPRESSED IN LUNG, SIGNAL = 1.4; EXPRESSED IN HELA, SIGNAL = 0.9; SWISSPROT HIT: P04404, EVALUE 3.90e-02
NRTRKDMERGNTQEDAADGEQREEEETAGGQTLAAEAEGDRESELSEVPEAGGEG

SEQ ID NO: 33939 - protein, 29 aa, Homo sapiens
  MAP TO AP001067.1; EXPRESSED IN HELA, SIGNAL = 0.28
WACSRQACNGRARSRPAGRGRRCSKLDGS

SEQ ID NO: 33940 - protein, 315 aa, Homo sapiens
  MAP TO AC009974.2; EXPRESSED IN HELA, SIGNAL = 0.94; SWISSPROT HIT: Q04727, EVALUE 4.00e-01
PYLCLAAAGENPSGKSLASAISGKIPSPLSSSYKPMLNNNSFMWPNSTPVPLLQTTQGLKPVSPPKIQPVSWHHSGGTGDCAPQPVDHKVPKSIGTVPADASAHIALSTASSHDTSTTSVASSWYNRNNLAMRAEPLSCALDDSSDSQDPTKEIRFTEAVRKLTARGFEKMPRQGCQLEQSSFLNPSFQWNVLNRSRRWKPPAVNQQFPQEDAGSVRRVLPGASDTLGLDNTVFCTKRISIHLLASHASGLNHNPACESVIDSSAFGEGKAPGPPFPQTLGIANVATRLSSIQLGQSEKERPEEARELDSSDRDI

SEQ ID NO: 33941 - protein, 46 aa, Homo sapiens
  MAP TO AC009974.2; EXPRESSED IN HELA, SIGNAL = 0.94
SLLTIRCPKALALSQLMPVPISPCLPLAPTTHPPPVLPLPGITGIT

SEQ ID NO: 33942 - protein, 200 aa, Homo sapiens
  MAP TO AC010636.3; EXPRESSED IN HELA, SIGNAL = 1.1; SWISSPROT HIT: P35789, EVALUE 2.00e-83
MCSHFAQDLWPEQSMKDSFQKVVLRRYEKCEHDNLQLKKGCISVDECKVHKEGYNELNQCLTTTPRKICQCDKYVKVLHQFPNSNGQKRGHTGKKPFKYIECGKAFKQFSTLTTHKKIHTGGKPYKCEECGKAFNHSCSLTRHKKIHTGEKPYKCEECGKAFKHSSTLTTHKRNHTGEKPYKCDKCGKAFMSSSTLSKHE

SEQ ID NO: 33943 - protein, 175 aa, Homo sapiens
  MAP TO AL121657.1; EXPRESSED IN HELA, SIGNAL = 0.41; SWISSPROT HIT: P42567, EVALUE 8.00e-21
DQLQAQDFSKFQPLKSKLLEVVDDMLAHDIAQLMVLVRQEESQRPIQMVKGGAFEGTLHGPFGHGYGEGAGEGIDDAEWVVARDKPMYDEIFYTLSPVDGKITGANAKKEMVRSKLPNSVLGKIWKLADIDKDGMLDDDEFALANHLIKVKLEGHELPNELPAHLLPPSKRKVAE

SEQ ID NO: 33944 - protein, 176 aa, Homo sapiens
  MAP TO AC002310.1; EXPRESSED IN HELA, SIGNAL = 1.2; SWISSPROT HIT: P28698, EVALUE 2.00e-34
NKEEERQREGTGALEKPDPVAAGSPGLKAPQAPFAGLEQLSKARRRSRPRFFAHPPVPRADQRHGCYVCGKSFAWRSTLVEHIYSHRGEKPFHCADCGKGFGHASSLSKHRAIHRGERPHRCPECGRAFMRRTALTSHLRVHTGEKPYRCPQCGRCFGLKTGMAKHQWVHRPGGEG

SEQ ID NO: 33945 - protein, 366 aa, Homo sapiens
  MAP TO AF230666.1; EXPRESSED IN HELA, SIGNAL = 0.33; SWISSPROT HIT: P01266, EVALUE 0.00e+00
EGQSCASERQQALSRLYFGTSGYFSQHDLFSSPEKRWASPRVARFATSCPPTIKELFVDSGLLRPMVEGQSQQFSVSENLLKEAIRAIFPSRGLARLALQFTTNPKRLQQNLFGGKFLVNVGQFNLSGALGTRGTFNFSQFFQQLGLASFLNGGRQEDLAKPLSVGLDSNSSTGTPEAAKKDGTMNKPTVGSFGFEINLQENQNALKFLASLLELPEFLLFLQHAISVPEDVARDLGDVMETVLSSQTCEQTPERLFVPSCTTEGSYEDVQCFSGECWCVNSWGKELPGSRVRGGQPRCPTDCEKQRARMQSLMGSQPAGSTLFVPACTSEGHFLPVQCFNSECYCVDAEGQAIPGTRSAIGKPKK

SEQ ID NO: 33946 - protein, 42 aa, Homo sapiens
  MAP TO AF230666.1; EXPRESSED IN HELA, SIGNAL = 0.33; SWISSPROT HIT: O69873, EVALUE 5.80e-01
LKANLVPPKGSRPCPDSTLGPQATSASTTCSLPQRKDGPLQE

SEQ ID NO: 33947 - protein, 47 aa, Homo sapiens
  MAP TO AF230666.1; EXPRESSED IN HELA, SIGNAL = 0.33
WAASLLAPPCLSLLVLVRDISCLSSASTQSATVLMLRVRPFLELEVQ

SEQ ID NO: 33948 - protein, 188 aa, Homo sapiens
  MAP TO AC002364.1; EXPRESSED IN HELA, SIGNAL = 1.2; SWISSPROT HIT: Q14031, EVALUE 3.80e-01
LCASTLTVSSGSSRGSLASSRGSLASSRGSLSSVSFTDIYGLPQYEKPDAEGSQLLRFDLIPFDSLGRDAPFSEPPGPSGFHKQRRSLDTPQSLASLSSRSSLSSLSPPSSPLDTPFLPASRDSPLAQLADSCEGPGLGALDRLRAHASAMGDEDLPGMAALQPHGVPGDGEGPHERGPPPASAPVGG

SEQ ID NO: 33949 - protein, 180 aa, Homo sapiens
  MAP TO AC004690.1; EXPRESSED IN HELA, SIGNAL = 1.5
DSEGPARRGGAARRPGAPGGPGSEAAAGCPEPLSTAEAPAESATLPAWMRLYFYGMHGITLDVLVSSARRFARSPDLRMLGFSSPYRCLLHSLTHFALEKVYLQQRRCPNAFVFNFLLYPSAHVGLQTLAGQALLLSLGGGAGVAVAPGALDLALQYVLALYHCQVFLKRFLRLRYGRQR

SEQ ID NO: 33950 - protein, 46 aa, Homo sapiens
  MAP TO AC010328.4; EXPRESSED IN HELA, SIGNAL = 0.39; SWISSPROT HIT: P96936, EVALUE 2.20e+00
AKGKLIVKMRSLSMMLPQFQHPKEFLVFLKPIFLISMGIISSRKHT

SEQ ID NO: 33951 - protein, 84 aa, Homo sapiens
  MAP TO AC010336.5; EXPRESSED IN HELA, SIGNAL = 0.39; SWISSPROT HIT: Q99490, EVALUE 9.80e+00
VRPCRGLPLPDRALLTVCAPSTRLKGPSRRPPPLAHWIRGPVPARAVGRRRLGPGPGRPRGARSRRAWASCHWGRCRRASCSTC

SEQ ID NO: 33952 - protein, 314 aa, Homo sapiens
  MAP TO AL356019.2; EXPRESSED IN HELA, SIGNAL = 0.91; SWISSPROT HIT: Q9GZK7, EVALUE 4.00e-70
LGPQNRTMHFVTEFVLLGFHGQREMQSCFFSFILVLYLLTLLGNGAIVCAVKLDRRLHTPMYILLGNFAFLEIWYISSTVPNMLVNILSEIKTISFSGCFLQFYFFFSLGTTECFFLSVMAYDRYLAICRPLHYPSIMTGKFCIILVCVCWVGGFLCYPVPIVLISQLPFCGPNIIDHLVCDPGPLFALACISAPSTELICYTFNSMIIFGPFLSILGSYTLVIRAVLCIPSGAGRTKAFSTCGSHLMVVSLFYGTLMVMYVSPTSGNPAGMQKIITLVYTAMTPFLNPLIYSLRNKDMKDALKRVLGLTVSQN

SEQ ID NO: 33953 - protein, 32 aa, Homo sapiens
  MAP TO AC004979.1; EXPRESSED IN PLACENTA, SIGNAL = 1.6; EXPRESSED IN HELA, SIGNAL = 2.4
LCYYCLSYFKFCRNHYESVYYSGQLQNLGQKP

SEQ ID NO: 33954 - protein, 421 aa, Homo sapiens
  MAP TO AC008848.4; EXPRESSED IN HELA, SIGNAL = 0.57; SWISSPROT HIT: Q14585, EVALUE 0.00e+00
LESRCEKFLQKDIFEIGAFNWEIMESLKCSDLEGSDFRADWECEGQFERQVNEECYFKQVNVTYGHMPVFQHHTSHTVRQSRETGEKLMECHECGKAFSRGSHLIQHQKIHTGEKPFGCKECGKAFSRASHLVQHQRIHTGEKPYDCKDCGKAFGRTSELILHQRLHTGVKPYECKECGKTFRQHSQLILHQRTHTGEKPYVCKDCGKAFIRGSQLTVHRRIHTGARPYECKECGKAFRQHSQLTVHQRIHTGEKPYECKECGKGFIHSSEVTRHQRIHSGEKPYECKECGKAFRQHAQLTRHQRVHTGDRPYECKDCGKAFSRSSYLIQHQRIHTGDKPYECKECGKAFIRVSQLTHHQRIHTCEKPYECRECGMAFIRSSQLTEHQRIHPGIKPYECRECGQAFILGSQLIEHYRIHTG

SEQ ID NO: 33955 - protein, 23 aa, Homo sapiens
  MAP TO AC008848.4; EXPRESSED IN HELA, SIGNAL = 0.57
TWSPGVRNFYKKTFLKSGHSTGR

SEQ ID NO: 33956 - protein, 79 aa, Homo sapiens
  MAP TO AC008848.4; EXPRESSED IN HELA, SIGNAL = 0.57; SWISSPROT HIT: Q10438, EVALUE 2.40e+00
KFTLVKNPLDVRNVGRPSAVPHTLFSIREFTRVRNLMTVRTVGRPLVVHQNLFYIRDFILVSNLMNVKNVGRPLGSIHS

SEQ ID NO: 33957 - protein, 49 aa, Homo sapiens
  MAP TO AL023096.1; EXPRESSED IN HELA, SIGNAL = 0.61; SWISSPROT HIT: P55635, EVALUE 8.20e+00
MRPGVLRAVGELLWLPSASTPSLWPPRLGFMRLPAATEAALLVQEASMR

SEQ ID NO: 33958 - protein, 30 aa, Homo sapiens
  MAP TO AC004204.1; EXPRESSED IN HELA, SIGNAL =  13
MAKLGGGVNELKVNLLQSPLLCLHQQGLVE

SEQ ID NO: 33959 - protein, 20 aa, Homo sapiens
  MAP TO AC004204.1; EXPRESSED IN HELA, SIGNAL =  13
FALGHPDDVDHLILPKHLVH

SEQ ID NO: 33960 - protein, 137 aa, Homo sapiens
  MAP TO AL118558.2; EXPRESSED IN HELA, SIGNAL = 1.3; SWISSPROT HIT: P38650, EVALUE 2.00e-72
VTAVAQQNQGEVPEPQDMKVAEVLFDAADANAIEEVNLAYENVKEVDGLDVSKEGTEAWEAAMKRYDERIDRVETRITARLRDQLGTAKNANEMFRIFSRFNALFVRPHIRGAIREYQTQLIQRVKDDIESLHDKFK

SEQ ID NO: 33961 - protein, 193 aa, Homo sapiens
  MAP TO AL118558.2; EXPRESSED IN HELA, SIGNAL = 1.3; SWISSPROT HIT: Q9JHU4, EVALUE 1.00e-105
IDRQLTAYMKRVEDVLGKGWENHVEGQKLKQDGDSFRMKLNTQEIFDDWARKVQQRNLGVSGRIFTIESTRVRGRTGNVLKLKVNFLPEIITLSKEVRNLKWLGFRVPLAIVIKAHQANQLYPFAISLIESVRTYERTCEKVEERNTISLLVAGLKKEVQALIAEGIALVWESYKLDPYVQRLAETVFNFQEK

SEQ ID NO: 33962 - protein, 17 aa, Homo sapiens
  MAP TO AL118558.2; EXPRESSED IN HELA, SIGNAL = 1.3
SRQLHNRIKERSLNPKI

SEQ ID NO: 33963 - protein, 588 aa, Homo sapiens
  MAP TO AC009948.2; EXPRESSED IN HELA, SIGNAL = 1.1; SWISSPROT HIT: P16419, EVALUE 9.00e-58
APEIDLDVALRTSVIAKAGEDVQVLIPFKGRPPPTVTWRKDEKNLGSDARYSIENTDSSSLLTIPQVTRNDTGKYILTIENGVGEPKSSTVSVKVLDTPAACQKLQVKHVSRGTVTLLWDPPLIDGGSPIINYVIEKRDATKRTWSVVSHKCSSTSFKLIDLSEKTPFFFRVLAENEIGIGEPCETTEPVKAAEVPAPIRDLSMKDSTKTSVILSWTKPDFDGGSVITEYVVERKGKGEQTWSHAGISKTCEIEVSQLKEQSVLEFRVFAKNEKGLSDPVTIGPITVKELIITPEVDLSDIPGAQVTVRIGHNVHLELPYKGKPKPSISWLKDGLPLKESEFVRFSKTENKITLSIKNAKKEHGGKYTVILDNAVCRIAVPITVITLGPPSKPKGPIRFDEIKADSVILSWDVPEDNGGGEITCYSIEKRETSQTNWKMVCSSVARTTFKVPNLVKDAEYQFRVRAENRYGVSQPLVSSIIVAKHQFRIPGPPGKPVIYNVTSDGMSLTWDAPVYDGGSEVTGFHVEKKERNSILWQKVNTSPISGREYRATGLVEGLDYQFRVYAENSAGLSSPSDPSKFTLAVSPV

SEQ ID NO: 33964 - protein, 20 aa, Homo sapiens
  MAP TO AC009948.2; EXPRESSED IN HELA, SIGNAL = 1.1
TWMWLSELLLLPKLVKMYKC

SEQ ID NO: 33965 - protein, 189 aa, Homo sapiens
  MAP TO AC004962.1; EXPRESSED IN HELA, SIGNAL = 0.99; SWISSPROT HIT: P56558, EVALUE 2.80e-01
MAELEAVADDLDAVIDDLDYLPGHFHLEMQLNFEPRSPAPQRARDLKLQREGLRQELQLAAAPQRPAVRHLLGAFAFYLEELDEARECFLEVAHEHPGNLNAWANLAHVYGRLGQEEEEEACAARLADLMGLAEEPEAAGDPQLRAARCLAEQGYAHGFDVGCASPEERARGLAAGIALYDKALGYGQQ

SEQ ID NO: 33966 - protein, 151 aa, Homo sapiens
  MAP TO AC007011.1; EXPRESSED IN HELA, SIGNAL = 0.41
ASRDDDLLLPYPRARARLPRDCTRVRAGNREHESWPPPPATPGAGGLAVRTFVSHFRDRAVAGHLTRAVEPLRTFSVLEPGGPGGCAARRRATVEETARAADCRVAQNGGFFRMNSGECLGNVVSDERRVSSSGGLQNAQFGIRRDGTLVT

SEQ ID NO: 33967 - protein, 60 aa, Homo sapiens
  MAP TO AC007011.1; EXPRESSED IN HELA, SIGNAL = 0.41; SWISSPROT HIT: P31315, EVALUE 5.50e-01
TTCYCPIHARARASPGTAHGCAPATASTRVGLRLPRLPAPAVWPCAPSCRTSGTARWPAT

SEQ ID NO: 33968 - protein, 155 aa, Homo sapiens
  MAP TO AC005940.3; EXPRESSED IN HELA, SIGNAL = 0.19; SWISSPROT HIT: Q93084, EVALUE 3.00e-84
GTNITSGKAVGVAVATGLHTELGKIRSQMAAVEPERTPLQRKLDEFGRQLSHAISVICVAVWVINIGHFADPAHGGSWLRGAVYYFKIAVALAVAAIPEGLPAVITTCLALGTRRMARKNAIVRSLPSVETLGCTSVICSDKTGTLTTNQMSVCR

SEQ ID NO: 33969 - protein, 49 aa, Homo sapiens
  MAP TO AC005940.3; EXPRESSED IN HELA, SIGNAL = 0.19; SWISSPROT HIT: P12252, EVALUE 5.10e-02
AKRWVWPWPPACTRSWARSGARWRQSSPSGRRCSASWTSLDGSCPTPSL

SEQ ID NO: 33970 - protein, 254 aa, Homo sapiens
  MAP TO AL031667.17; EXPRESSED IN HELA, SIGNAL = 0.26; SWISSPROT HIT: Q9TU67, EVALUE 1.20e+00
RKGPGLFGERLERLEGDVQRLAQTYGTLSGLVASHEDPNRMTGGPRAPAVPVGFGVIPEGLVGPGDRARGPLTPPLDEILSKVTEVSNTLQTKVQLLDKVHGLALGHEAHLQRLREAPPSPLTSLALLEEYVDRRLHRLWGSLLDGFEQKLQGVQSECDLRVQEVRRQCEEGQAASRRLHQSLDGRELALRQELSQLGSQLQGLSVSGRGSCCGQLALINARMDGLERALQAVTETQRGPGAPAGDELTRLSAA

SEQ ID NO: 33971 - protein, 152 aa, Homo sapiens
  MAP TO AC008132.26; EXPRESSED IN HELA, SIGNAL = 0.45; SWISSPROT HIT: P18899, EVALUE 2.00e-05
PHEDTVHNITNEDASHDITNEDAVHGIANEAAAQGIANEDAAQGIANEDAAHGIASEDAAQGIANEVAAQGIANEDAAQGIANEDAVHGIANEDAAHGIANEDAVHGIANEDSVYDIANEDAIYDIANDTVQGTLTRMLYTTSLMRTPYKAS

SEQ ID NO: 33972 - protein, 262 aa, Homo sapiens
  MAP TO AL121758.4; EXPRESSED IN HELA, SIGNAL = 0.5; SWISSPROT HIT: Q91924, EVALUE 2.00e-44
YAPHRLPPSSYDADQKPGLELAPAEPAYPPAAPEEYSDPESPQSSLSARYFRGEAAVTDSYSMDAFFISDGRSRRRRGGGGGDAGGSGDAGGAGGRAGRAGAQAGGGHRHACAECGKTYATSSNLSRHKQTHRSLDSQLARKCPTCGKAYVSMPALAMHLLTHNLRHKCGVCGKAFSRPWLLQGHMRSHTGEKPFGCAHCGKAFADRSNLRAHMQTHSAFKHYRCRQCDKSFALKSYLHKHCEAACAKAAEPPPPTPAGPAS

SEQ ID NO: 33973 - protein, 281 aa, Homo sapiens
  MAP TO AF196779.1; EXPRESSED IN HELA, SIGNAL = 0.87; SWISSPROT HIT: P02812, EVALUE 7.00e-03
PASDRASLFVARTRRSNSSEALLVDRAAGGGAGSPPAPLAPSASGPPVCKSSEVLYERPQPTPAFSSRTAGPPDPPRAARPSSAAPASRGAPRLPPVCGDFLLDYSLDRGLPRSGGGTGWGELPPAAEVPGPLSRRDGLLTMLPGPPPVYAADSNSPLLRTKDPHTRATRTKPCGLPPEAAEGPEVHPNPLLWMPPPTRIPSAGERSGHKNLALEGLRDWYIRNSGLAAGPQRRPVLPSVGPPHPPFLHARCYEVGQALYGAPSQAPLPHSRSFTAPPVSG

SEQ ID NO: 33974 - protein, 18 aa, Homo sapiens
  MAP TO AF196779.1; EXPRESSED IN HELA, SIGNAL = 0.87
PACPSGSLCLWPPSLQEQ

SEQ ID NO: 33975 - protein, 240 aa, Homo sapiens
  MAP TO AC008764.4; EXPRESSED IN HELA, SIGNAL = 0.73; SWISSPROT HIT: Q05722, EVALUE 1.00e-03
ETRLGKLINDVRKKTKNEELAKRAKKLLRSWQKLIEPAHQHEAALRGLAGATGSANGGAHNCRPEVGAAGPPRSIHDLKSRNDLQRLPGQRLDRLGSRKRRGDQRDLGHPGPPPKVSKASHDPLVPNSSPLPTNGISGSPESFASSLDGSGHAGPEGSRLERDENDKHSGKIPVNAVRPHTSSPGLGKPLDPACSQRLRCCSSWTGWTRLRGLPIPRDPLAALSVLGTHGMRAPLPGSRA

SEQ ID NO: 33976 - protein, 77 aa, Homo sapiens
  MAP TO AC008764.4; EXPRESSED IN HELA, SIGNAL = 0.73
KHDLGSSSTTSARKPRTRSSPSGPRSCCGAGRSSSSRHTSMRRRCGGWRGPPALPTGAHTTAGRRWGRLAHPGASMT

SEQ ID NO: 33977 - protein, 24 aa, Homo sapiens
  MAP TO AL353997.2; EXPRESSED IN HELA, SIGNAL = 0.21
PQPCCLRTFSFCRCWGCLSASWRC

SEQ ID NO: 33978 - protein, 213 aa, Homo sapiens
  MAP TO AL353997.2; EXPRESSED IN HELA, SIGNAL = 0.21; SWISSPROT HIT: Q12967, EVALUE 9.40e-01
LAARAEREELPVPAMEPQPTAWGSPHPEAVLQLEVAPESSGPCTDTAKDQQSDKLPDLMPPAVATGLSPGAESIAGDRRGREEVASMAPASSSHAAPSPGHGASLGVRDQGVQSELLYLTKERPLLFTRATALLPQDLFILPVLGLSICKLEVLRAGKGGCEEGFGQLLLLSEVASSSRHGGLSTTGLLGYLPLICSLVRALLNRQARGAGTR

SEQ ID NO: 33979 - protein, 88 aa, Homo sapiens
  MAP TO AL031777.2; EXPRESSED IN HELA, SIGNAL = 0.88; SWISSPROT HIT: P43277, EVALUE 2.00e-15
MSETAPLAPTIPAPAEKTPVKKKAKKAGATAGKRKASGPPVSELITKAVAASKERSGVSLAALKKALAAAGYDVEKNNSRIKLGLKSL

SEQ ID NO: 33980 - protein, 222 aa, Homo sapiens
  MAP TO AP000041.1; EXPRESSED IN HELA, SIGNAL = 0.48; SWISSPROT HIT: Q59098, EVALUE 3.60e-01
PHAHLHVCAFGSIYQAPAKCQGLSSAPGVNCPGPVPGAAVLTSRADPGRLHELFCEKDTPFVCRVLTSEGSCSTCLVAKRCHSRPGAMAAMPFSLLCFPVPGALPPAATPGQLCARTSFCLAARPRRSLNVSRNSEKGRERIRKKAREGPGKQWEVCALEPRESPPVWHGLLPGRPAVQQRPAPTRTRSFVGEKHKEEGKTRRRPTAPGRGGQPGTPGAGAH

SEQ ID NO: 33981 - protein, 259 aa, Homo sapiens
  MAP TO AL078605.18; EXPRESSED IN HELA, SIGNAL = 0.6; SWISSPROT HIT: O00548, EVALUE 0.00e+00
AKCVDLGDAYLCRCQAGFSGRHCDDNVDDCASSPCANGGTCRDGVNDFSCTCPPGYTGRNCSAPVSRCEHAPCHNGATCHERGHRYVCECARGYGGPNCQFLLPELPPGPAVVDLTEKLEGQGGPFPWVAVCAGVILVLMLLLGCAAVVVCVRLRLQKHRPPADPCRGETETMNNLANCQREKDISVSIIGATQIKNTNKKADFHGDHSADKNGFKARYPAVDYNLVQDLKGDDTAVRDAHSKRDTKCQPQGSSGEEKG

SEQ ID NO: 33982 - protein, 347 aa, Homo sapiens
  MAP TO AC018761.2; EXPRESSED IN HELA, SIGNAL = 7.6; SWISSPROT HIT: P17275, EVALUE 0.00e+00
MCTKMEQPFYHDDSYTATGYGRAPGGLSLHDYKLLKPSLAVNLADPYRSLKAPGARGPGPEGGGGGSYFSGQGSDTGASLKLASSELERLIVPNSNGVITTTPTPPGQYFYPRGGGSGGGAGGAGGGVTEEQEGFADGFVKALDDLHKMNHVTPPNVSLGATGGPPAGPGGVYAGPEPPPVYTNLSSYSPASASSGGAGAAVGTGSSYPTTTISYLPHAPPFAGGHPAQLGLGRGASTFKEEPQTVPEARSRDATPPVSPINMEDQERIKVERKRLRNRLAATKCRKRKLERIARLEDKVKTLKAENAGLSSTAGLLREQVAQLKQKVMTHVSNGCQLLLGVKGHAF

SEQ ID NO: 33983 - protein, 30 aa, Homo sapiens
  MAP TO AC018761.2; EXPRESSED IN HELA, SIGNAL = 7.6
WNSPSTTTTHTQLRDTAGPLVASLYTTTNS

SEQ ID NO: 33984 - protein, 281 aa, Homo sapiens
  MAP TO AL161730.2; EXPRESSED IN HELA, SIGNAL = 0.9; SWISSPROT HIT: Q21313, EVALUE 2.20e+00
QKESKCESCQNGQEELISKSHQLYLGSSSRSNGVIGKQSIGSSISEYSNKPDSILSPHPGEQSGGEESPRSLSSSDLESGNESEWVKDLTATKASLPTVSSRPRDPLDILTKIFPNYRRSRLEGILRFCKGDVVQAIEQVLNGKEHKPDNRNLANSEELENTAFQRASSFSLAGIGFGTLGNKSAFSPLQTTSASYGGDSSLYGVNPRVGISPLRLAYSSAGRGLSGFMSPYLTPGLVPTLPFRPALDYAFSGMIRDSSYLSSKDSITCGRLYFRPNQDNP

SEQ ID NO: 33985 - protein, 52 aa, Homo sapiens
  MAP TO AC011625.2; EXPRESSED IN HELA, SIGNAL = 0.43
MRSFICFKMKMHRADSSRDFIFRFWPLEKTVKSRSSSGWTPRVLPSTAPALD

SEQ ID NO: 33986 - protein, 189 aa, Homo sapiens
  MAP TO AC010724.1; EXPRESSED IN HELA, SIGNAL = 0.87; SWISSPROT HIT: Q08379, EVALUE 7.00e-10
EPLAPQPPAGPSKVEQLQDETNHLRKELESVGRQLQAEVENNQMLSLLNRRQEERLREQEERLREQEERLCEQEERLCEQEERLREQEERLCEQEKLPGQERLLEEVEKLLKQERRQEEQERLLERERLLDEVEELLEQERLRQQDERLWQQETLRELERLRELERMLELGWEALYEQRAEPRSGFEEL

SEQ ID NO: 33987 - protein, 231 aa, Homo sapiens
  MAP TO AL121757.2; EXPRESSED IN HELA, SIGNAL = 0.61; SWISSPROT HIT: P25103, EVALUE 2.00e-20
YLAIVHPLKPRMNYQTASFLIALVWMVSILIAIPSAYFATETVLFIVKSQEKIFCGQIWPVDQQLYYKSYFLFIFGVEFVGPVVTMTLCYARISRELWFKAVPGFQTEQIRKRLRCRRKTVLVLMCILTAYVLCWAPFYGFTIVRDFFPTVFVKEKHYLTAFYVVECIAMSNSMINTVCFVTVKNNTMKYFKKMMLLHWRPSQRGSKSSADLDLRTNGVPTTEEVDCIRLK

SEQ ID NO: 33988 - protein, 235 aa, Homo sapiens
  MAP TO AC025115.2; EXPRESSED IN HELA, SIGNAL = 0.99; SWISSPROT HIT: Q13606, EVALUE 3.00e-65
TYTMVNFTHVSEFVLLGFQGGPGMQAMLFLIFLILYGIAVVGNLGMIVIIWVDAHLHTPMYAFLQSLSLLDICYSSTIAPRALANSMQEDHTISFGGCAAQFFFLSLFGITEAFLLAAMAYDRFIAICNPLLYSVSMSHQVCVLLISGSYLWGVVNAIAQTTMTFRLPFCGSNEINDFFCDVPPLLSLSCSDTFINQLVLLGLCGSIIVSTFLIVLVSYIYIISTILRIPTMQGR

SEQ ID NO: 33989 - protein, 23 aa, Homo sapiens
  MAP TO AC025115.2; EXPRESSED IN HELA, SIGNAL = 0.99
RLSSWLPWPMTASSPSATLFCTL

SEQ ID NO: 33990 - protein, 221 aa, Homo sapiens
  MAP TO Z82188.2; EXPRESSED IN HELA, SIGNAL = 0.42; SWISSPROT HIT: O00160, EVALUE 8.90e+00
QARVSITVPYLLSGWKCRHMTRTWPTMAPYHHVFGDWPKGPSCDLVGANPLSSLKSAIWIIGRKDIYCFWIKVYKDVGSAPSRVSSMFPEGPGLWEVTPEQARVHGAHTHLHIHTHQDTVSGGEIGPGHSCYQVSPSLLTRARDRSSKGFPNWPPRDHSRTLLSCPRQQEGRISQRRPEGQGILPPLDPQIFLKKPQTKSQGRASSLHLHTKCGFVNFLLF

SEQ ID NO: 33991 - protein, 199 aa, Homo sapiens
  MAP TO AL163152.2; EXPRESSED IN HELA, SIGNAL = 0.38; SWISSPROT HIT: Q15615, EVALUE 7.00e-59
GEMFLLVVMAFDRYIAICRPLHYSTIMNPRACYALSLVLWLGGFIHSIVQVALILHLPFCGPNQLDNFFCDVPQVIKLACTNTFVVELLMVSNSGLLSLLCFLGLLASYAVILCRIREHSSEGKSKAISTCTTHIIIIFLMFGPAIFIYTCPFQAFPADKVVSLFHTVIFPLMNPVIYTLRNQEVKASMRKLLSQHMFC

SEQ ID NO: 33992 - protein, 222 aa, Homo sapiens
  MAP TO AL096801.15; EXPRESSED IN HELA, SIGNAL = 0.49; SWISSPROT HIT: P20333, EVALUE 1.00e-23
LGFLSTTTAQPEQKASNLIGTYRHVDRATGQVLTCDKCPAGTYVSEHCTNTSLRVCSSCPVGTFTRHENGIEKCHDCSQPCPWPMIEKLPCAALTDRECTCPPGMFQSNATCAPHTVCPVGWGVRKKGTETEDVRCKQCARGTFSDVPSSVMKCKAYTDCLSQNLVVIKPGTKETDNVCGTLPSFSSSTSPSPGTAIFPRPEHMETHEVPSSTYVPKGNLTS

SEQ ID NO: 33993 - protein, 164 aa, Homo sapiens
  MAP TO AC002080.1; EXPRESSED IN HELA, SIGNAL = 0.82; SWISSPROT HIT: P08581, EVALUE 4.00e-95
VLAPGILVLLFTLVQRSNGECKEALAKSEMNVNMKYQLPNFTAETPIQNVILHEHHIFLGATNYIYVLNEEDLQKVAEYKTGPVLEHPDCFPCQDCSSKANLSGGVWKDNINMALVVDTYYDDQLISCGSVNRGTCQRHVFPHNHTADIQSEVHCIFSPQIEEP

SEQ ID NO: 33994 - protein, 490 aa, Homo sapiens
  MAP TO AL137853.3; EXPRESSED IN HELA, SIGNAL = 0.3; SWISSPROT HIT: Q9UPN3, EVALUE 0.00e+00
DRINRLQAALASTQQFQQMFDELRTWLDDKQSQQAKNCPISAKLERLQSQLQENEEFQKSLNQHSGSYEVIVAEGESLLLSVPPGEEKRTLQNQLVELKNHWEELSKKTADRQSRLKDCMQKAQKYQWHVEDLVPWIEDCKAKMSELRVTLDPVQLESSLLRSKAMLNEVEKRRSLLEILNSAADILINSSEADEDGIRDEKAGINQNMDAVTEELQAKTGSLEEMTQRLREFQESFKNIEKKVEGAKHQLEIFDALGSQACSNKNLEKLRAQQEVLQALEPQVDYLRNFTQGLVEDAPDGSDASQLLHQAEVAQQEFLEVKQRVNSGCVMMENKLEGIGQFHCRVREMFSQLADLDDELDGMGAIGRDTDSLQSQIEDVRLFLNKIHVLKLDIEASEAECRHMLEEEGTLDLLGLKRELEALNKQCGKLTERGKARQEQLELTLGRVEDFYRKLKGLNDATTAAEEAEALQWVVGTEVEIINQQLADFK

SEQ ID NO: 33995 - protein, 159 aa, Homo sapiens
  MAP TO AL139342.2; EXPRESSED IN HELA, SIGNAL = 0.88; SWISSPROT HIT: P46582, EVALUE 1.90e+00
VILLEDHPIAPVSSTSPGIKVESLPASQAHMLETTTKSVIPVKPVATETLINGKGKERGGKGQPPLRHRSEGGLVDKGPLKKLPHLSLSQYDLLETDVSFQPWGSENSVLIPEPVSCPRGSIRERVQSKSPQDSLSSSCPQCDTIVAKPVEEPADTSCQ

SEQ ID NO: 33996 - protein, 45 aa, Homo sapiens
  MAP TO AP001660.1; EXPRESSED IN HELA, SIGNAL = 0.52; SWISSPROT HIT: P17332, EVALUE 1.70e+00
MNGDFMKVVARSMEEDIVWLKEKNYSQTYFLSYQESGQRTVPRGW

SEQ ID NO: 33997 - protein, 29 aa, Homo sapiens
  MAP TO AC011904.3; EXPRESSED IN HELA, SIGNAL = 0.85; SWISSPROT HIT: Q62225, EVALUE 6.70e+00
CGRRIRPLWQTSSLRGSSMTPLPTFSFSP

SEQ ID NO: 33998 - protein, 172 aa, Homo sapiens
  MAP TO AC005500.1; EXPRESSED IN HELA, SIGNAL = 0.79; SWISSPROT HIT: Q21313, EVALUE 1.00e-17
CPRQFWGPDCKELCSCHPHGQCEDVTGQCTCHARRWGARCEHACQCQHGTCHPRSGACRCESGWWGAQCASACYCSATSRCDPQTGACLCHAGWWGRSCNNQCACNSSPCEQQSGRCQCRERTFGARCDRYCQCFRGRCHPVDGTCACEPGYRGKYCREPCPAGFYGLGCRR

SEQ ID NO: 33999 - protein, 25 aa, Homo sapiens
  MAP TO AC005500.1; EXPRESSED IN HELA, SIGNAL = 0.79
SARASSGAPTARSCVAATHTGSART

SEQ ID NO: 34000 - protein, 19 aa, Homo sapiens
  MAP TO AC010271.5; EXPRESSED IN HELA, SIGNAL = 0.46
AEQGSEAETGGGGGEGTSG

SEQ ID NO: 34001 - protein, 222 aa, Homo sapiens
  MAP TO AC010271.5; EXPRESSED IN HELA, SIGNAL = 0.46; SWISSPROT HIT: Q14140, EVALUE 2.70e-01
MLSKGLKRKREEEEEKEPLAVDSWWLDPGHTAVAQAPPAVASSSLFDLSVLKLHHSLQQSEPDLRHLVLVVNTLRRIQASMAPAAALPPVPSPPAAPSVADNLLASSDAALSASMASLLEDLSHIEGLSQAPQPLADEGPPGRSIGGAAPSLGALDLLGPATGCLLDDGLEGLFEDIDTSMYDNELWAPASEGLKPGPEDGPGKEEAPELDEAELDYLMDVL

SEQ ID NO: 34002 - protein, 64 aa, Homo sapiens
  MAP TO AL355834.1; EXPRESSED IN HELA, SIGNAL = 0.45
RYPTVEKRARVFNGASYVPVPEDGPFLKALLFELRLLDDDKDFVESRDSCSRINKTSIYGLLIG

SEQ ID NO: 34003 - protein, 128 aa, Homo sapiens
  MAP TO AL355834.1; EXPRESSED IN HELA, SIGNAL = 0.45; SWISSPROT HIT: Q58508, EVALUE 9.20e-02
EQTLSPRPPLISVSGVSQGFEFLFGIQDFLYSGQKNDSELNTKLSQLPDLLLQACPFGTLLDANLQNSLDNTNFASVTQPQKQPAWKTGTYKGKPQVSISITEKVKSMQYDKQGIADTWQVVGTVTCK

SEQ ID NO: 34004 - protein, 61 aa, Homo sapiens
  MAP TO AL355834.1; EXPRESSED IN HELA, SIGNAL = 0.45; SWISSPROT HIT: P29994, EVALUE 6.10e+00
GIQLLKNEPESSMEQVMCLFLKMVPFLKHCSLNLDYWMMIKTSLRVVIAVHASIKHPFMDS

SEQ ID NO: 34005 - protein, 186 aa, Homo sapiens
  MAP TO AC023112.3; EXPRESSED IN HELA, SIGNAL = 0.39
EILVLNHHRRDLHHHHHHHHHQHHHHHHCHHCITITIITIIITLITIITIITIITTITTITTITTIITIITIITITVTTITIITLIIIIAIITIIITIITITIITITIIITIIITLTITTFIIIITIITTIITIIAIITIITTTIICHHYHHHHHDHNHHHHHHYHHHHDHHYHPPPHIYWTLTMC

SEQ ID NO: 34006 - protein, 226 aa, Homo sapiens
  MAP TO AC000026.3; EXPRESSED IN HELA, SIGNAL = 0.39; SWISSPROT HIT: Q99501, EVALUE 9.00e-55
ILNCVPAHSDSAGPGMADPVAGIAGSAAKSVRPFRSSEAYVEAMKEDLAEWLNALYGLGLPGGGDGFLTGLATGTTLCQHANAVTEAARALAAARPARGVAFQAHSVVPGSFMARDNVATFIGWCRVELGVPEVLMFETEDLVLRKNEKSVVLCLLEVARRGARLGLLAPRLVQFEQEIERELRAAPPAPNAPAAGEDTTETAPAPGTPARGPRMTPSDLRNLDEL

SEQ ID NO: 34007 - protein, 26 aa, Homo sapiens
  MAP TO AC007954.6; EXPRESSED IN HELA, SIGNAL = 1.1
WKQIQIQCHQRKPCLRFRGPQSEREI

SEQ ID NO: 34008 - protein, 73 aa, Homo sapiens
  MAP TO AC002084.1; EXPRESSED IN HELA, SIGNAL = 0.97; SWISSPROT HIT: P37176, EVALUE 2.60e+00
CTPDMSLPVLHTMLLPRLPSMDSQNARSTVMVSHTALPLTKALTLWPKKCGSGLMLMEFTGLTMFPIILKQLD

SEQ ID NO: 34009 - protein, 397 aa, Homo sapiens
  MAP TO AC004382.1; EXPRESSED IN HELA, SIGNAL = 0.5; SWISSPROT HIT: P78423, EVALUE 0.00e+00
GEDLDAQESGLPQLVSCLTDAKWEDRVSSRVCSPAEYWCCAPTPRWPGFLVSGHNRIPVFLPCSLETRQHRLFCADPKEQWVKDAMQHLDRQAAALTRNGGTFEKQIGEVKPRTTPAAGGMDESVVLEPEATGESSSLEPTPSSQEAQRALGTSPELPTGVTGSSGTRLPPTPKAQDGGPVGTELFRVPPVSTAATWQSSAPHQPGPSLWAEAKTSEAPSTQDPSTQASTASSPAPEENAPSEGQRVWGQGQSPRPENSLEREEMGPVPAHTDAFQDWGPGSMAHVSVVPVSSEGTPSREPVASGSWTPKAEEPIHATMDPQRLGVLITPVPDAQAATRRQAVGLLAFLGLLFCLGVAMFTYQSLQGCPRKMAGEMAEGLRYIPRSCGSNSYVLVPV

SEQ ID NO: 34010 - protein, 195 aa, Homo sapiens
  MAP TO AL163974.2; EXPRESSED IN HELA, SIGNAL = 0.31; SWISSPROT HIT: Q15542, EVALUE 5.60e-02
DGYSSLLEPGTEAPIKEAHRQDLRSHMPSPSQGRNPKGKASCHRWAARSSQEMARVSPAQPSSPESLNTGSRAVTGSLARLGRWREARLPFSRFLDEVTVRVLDPGTLEAFRVPRGRSPEPSAVDRGQGLAQEALTRAAAPGEKDPALSSQLSSEAATEAASRVGPGQAVGTSGPCLGSGKRGGRTASPWRSPGR

SEQ ID NO: 34011 - protein, 67 aa, Homo sapiens
  MAP TO AL163974.2; EXPRESSED IN HELA, SIGNAL = 0.31; SWISSPROT HIT: Q13415, EVALUE 5.40e-01
RTATAPSWSPGQKPPSRKLTDRTFEATCQAPAKVGTPRAKHLATAGQLGPARRWPGCRQPSLPPQSP

SEQ ID NO: 34012 - protein, 97 aa, Homo sapiens
  MAP TO AL163974.2; EXPRESSED IN HELA, SIGNAL = 0.31; SWISSPROT HIT: Q9M291, EVALUE 5.00e-04
AGRLQLPPGARDRSPHQGSSQTGPSKPHAKPQPRSEPQGQSILPPLGSSVQPGDGPGVASPAFLPRVPEHRQPGCHWLPRTPGPLAGGQTALLQVPG

SEQ ID NO: 34013 - protein, 26 aa, Homo sapiens
  MAP TO AC005937.1; EXPRESSED IN HELA, SIGNAL = 0.74
CGGDWDGCRAHGDLRGCAGGCAGGCG

SEQ ID NO: 34014 - protein, 186 aa, Homo sapiens
  MAP TO AL132857.3; EXPRESSED IN HELA, SIGNAL = 0.45; SWISSPROT HIT: O15522, EVALUE 3.00e-65
SDESSLETSPPDSSQRPSARPASPGSDAEKRKKRRVLFSKAQTLELERRFRQQRYLSAPEREQLASLLRLTPTQVKIWFQNHRYKLKRARAPGAAESPDLAASAELHAAPGLLRRVVVPVLVRDGQPCGGGGGGEVGTAAAQEKCGAPPAAACPLPGYPAFGPGSALGLFPAYQHLASPALVSWNW

SEQ ID NO: 34015 - protein, 72 aa, Homo sapiens
  MAP TO AL132857.3; EXPRESSED IN HELA, SIGNAL = 0.45
GRREKEEAAGAILQGADAGVGAALPAAAVPVCARARAAGEPASPHAHAGQDLVPESSLQAEARSRSRGGGVA

SEQ ID NO: 34016 - protein, 25 aa, Homo sapiens
  MAP TO AP000536.1; EXPRESSED IN HELA, SIGNAL = 0.35
CGSSVLQSHVREKHSEPSSSVLEYL

SEQ ID NO: 34017 - protein, 369 aa, Homo sapiens
  MAP TO AL024496.5; EXPRESSED IN HELA, SIGNAL = 1.7; SWISSPROT HIT: P38507, EVALUE 3.00e-03
MKCQTQKDIRRQPSSLSIREGRSKPQRTPGSTGAEVPGLEGAEVPGVEGAEVPGLEGAEVPGLEGAEVPGVEGAEVPGLEGAEVPGVEGAEVPGVEGAEVPGVEGAEVPGLEGAEVPGVEGAEVPGVEGAEVPGLEGAEVPGLEGAEVPGVEGAEVPGLEGAEVPGVEGAEVPGVEGAEVPGVEGAEVPGVEGAEVPGVKGAEVPGLEDAEVPGVEGAEVPGLEGAEVPGLEGAKVPGLEGAEVPDVEGAEIRGLEGAEVPGLEDAEVPGVEGAEVPGVEGAEVPGVEGAEVPGVEGAEVPDVEGAEVPGVKGAEVPDVEGAEVPGVERAVSAHETGCNFTSSAVPADPNARHTRRSRSHTVWLGEEQQ

SEQ ID NO: 34018 - protein, 191 aa, Homo sapiens
  MAP TO AC011536.5; EXPRESSED IN HELA, SIGNAL = 0.84; SWISSPROT HIT: Q9Y493, EVALUE 1.00e-25
VNGVLTALPVSVADGRISVTQGASKALLVADFGLQVSYDWNWRVDVTLPSSYHGAVCGLCGNMDRNPNNDQVFPNGTLAPSIPIWGGSWRAPGWDPLCWDECRGSCPTCPEDRLEQYEGPGFCGPLAPGTGGPFTTCHAHVPPESFFKGCVLDVCMGGGDRDILCKALASYVAACQAAGVVIEDWRAQVGC

SEQ ID NO: 34019 - protein, 122 aa, Homo sapiens
  MAP TO AC012398.4; EXPRESSED IN HELA, SIGNAL = 0.49; SWISSPROT HIT: P18899, EVALUE 4.00e-03
DAVDDIAYKDTVQDIANEDAVYDIANEDVVYDIANEDALQDIANEVAVYDIANEDIVYDIANEDALYDITNEDAVYNIANEDAVYGIANEDAVYEFANKDAVYDIANEDTVQDICKKEDAAN

SEQ ID NO: 34020 - protein, 24 aa, Homo sapiens
  MAP TO Z98883.3; EXPRESSED IN HELA, SIGNAL = 0.61
SRHGAQGLLPHVLRLDGQRAAGGT

SEQ ID NO: 34021 - protein, 77 aa, Homo sapiens
  MAP TO Z98883.3; EXPRESSED IN HELA, SIGNAL = 0.61; SWISSPROT HIT: O75601, EVALUE 8.60e-01
VKQLLAQVRQASQVGVAVLGTWCHCRQEPEESLGRFLESLGAVFPHEPWLRLCRERGGTFWSCEATHRQAPTAPGAP

SEQ ID NO: 34022 - protein, 59 aa, Homo sapiens
  MAP TO Z98883.3; EXPRESSED IN HELA, SIGNAL = 0.61; SWISSPROT HIT: Q92370, EVALUE 6.10e+00
RSEVLFRSDRFDEGPVRLSHWQSEGVEASILAELARRASGPICLLLASLLSLVSAVSAC

SEQ ID NO: 34023 - protein, 171 aa, Homo sapiens
  MAP TO Z98883.3; EXPRESSED IN HELA, SIGNAL = 0.61
LPAWCSRPSSPRAASRRTAGCWWDGGCRSRAAPWSWRSCTFPSSPSRSSSSWPRCGRPARWAWPCWAPGATAGRSPRRAWAASWRAWVLSSPMSPGCGCAGREAARSGAARPPTGKRPLPPVPLVRTRSCSSSMTSARCCCHSYTCPPSCPTARLEPPLPARGAWLPSSTR

SEQ ID NO: 34024 - protein, 161 aa, Homo sapiens
  MAP TO AL135818.3; EXPRESSED IN HELA, SIGNAL = 0.58; SWISSPROT HIT: P08121, EVALUE 2.00e-05
MSSHSPCTNSAGSRPGNAVHCLPPTSSPSLATSQPRQRTRLIPTSQPGLIPTLGGPSGLSKREQASGVTGASLPPQRGKQEAAGPEARGLKAQASRGATRGGPRLGQPARGEPARPWRVRGLEGRVELGQQLGLLTLGPAFPGGLGGTQRVGLPGPAGPGA

SEQ ID NO: 34025 - protein, 85 aa, Homo sapiens
  MAP TO AL135818.3; EXPRESSED IN HELA, SIGNAL = 0.58
DHADADGRLQGPELVEAEGMGHSQVAVHGDAAEEAHADVDVLVQEDAAHLAGQVAVRPVVVLQHVLQPEGQRADVEEVGHRQVAQ

SEQ ID NO: 34026 - protein, 178 aa, Homo sapiens
  MAP TO AL031685.15; EXPRESSED IN HELA, SIGNAL = 1.2
PWPAPPTAARMCFHPPPPATARPCCAVPTSPLRMTWICTQTLNPGPPTVGRMLCGRMCGCSETMPTPSTTSARPLPKSPPSPSAKAAGCPAAPPSASAVTACSPVLQLPSPAPSPARPRLMTAWPTGHLCGRSTQARLRASTASRTFTPNPSPPPRPLPAVASATAQAPPTPAPSVQK

SEQ ID NO: 34027 - protein, 589 aa, Homo sapiens
  MAP TO AC012313.5; EXPRESSED IN HELA, SIGNAL = 0.46; SWISSPROT HIT: P52740, EVALUE 0.00e+00
MCGPFLKDILHLAEHQGTQSEEKPYTCGACGRDFWLNANLHQHQKEHSGGKPFRWYKDRDALMKSSKVHLSENPFTCREGGKVILGSCDLLQLQAVDSGQKPYSNLGQLPEVCTTQKLFECSNCGKAFLKSSTLPNHLRTHSEEIPFTCPTGGNFLEEKSILGNKKFHTGEIPHVCKECGKAFSHSSKLRKHQKFHTEVKYYECIACGKTFNHKLTFVHHQRIHSGERPYECDECGKAFSNRSHLIRHEKVHTGERPFECLKCGRAFSQSSNFLRHQKVHTQVRPYECSQCGKSFSRSSALIQHWRVHTGERPYECSECGRAFNNNSNLAQHQKVHTGERPFECSECGRDFSQSSHLLRHQKVHTGERPFECCDCGKAFSNSSTLIQHQKVHTGQRPYECSECRKSFSRSSSLIQHWRIHTGEKPYECSECGKAFAHSSTLIEHWRVHTKERPYECNECGKFFSQNSILIKHQKVHTGEKPYKCSECGKFFSRKSSLICHWRVHTGERPYECSECGRAFSSNSHLVRHQRVHTQERPYECIQCGKAFSERSTLVRHQKVHTRERTYECSQCGKLFSHLCNLAQHKKIHT

SEQ ID NO: 34028 - protein, 248 aa, Homo sapiens
  MAP TO AC002994.2; EXPRESSED IN HELA, SIGNAL = 0.23; SWISSPROT HIT: P41891, EVALUE 2.60e-02
DPVFLEEAGKAEKIVISRSTSPTFNKQTKRVSWSSFNSLGQYFTGKIPKATPELGSSENSASSPPRFKTEKMESKTVLPFTDKCESSNLTVNTSFGSCPQSETIISSLKIDATLTRKNHSEHPLCSEEALDPDIELSLVSEEDKQSTSNRDFETEAEDESIYFTPELYDPEDTDEEKNDLAETDRGNRLANNSDCILAKDLFEIRTIKEVDSAREVKAEDCIDTKLNGILHIEESKIDDIDGNVKTTW

SEQ ID NO: 34029 - protein, 193 aa, Homo sapiens
  MAP TO AL050336.7; EXPRESSED IN HELA, SIGNAL = 1.2; SWISSPROT HIT: P35526, EVALUE 1.00e-37
IYSGLPVNRSLGSISMNDEDYSTIYDTIQNERTYEVPDQPEENESPHYDDVHEYLRPENDLYATQLNTHEYDFVSVYTIKGEETSLASVQSEDRGYLLPDEIYSELQEAHPGEPQEDRGISMEGLYSSTQDQQLCAAELQENGSVMKEDLPSPSSFTIQHSKAFSTTKYSCYSDAEGLEEKEGAHMNPEIYLF

SEQ ID NO: 34030 - protein, 202 aa, Homo sapiens
  MAP TO AL163636.2; EXPRESSED IN HELA, SIGNAL = 0.23; SWISSPROT HIT: P31792, EVALUE 1.00e-20
MTVDYRKLNQVVSPIAAAVPDVVLLLEQINTSPDTWYAAIDLANAFFSIPVHKAQQKQFAFSWQGQQYTFTVLPQGYISSLALCHNLIRRDLDGFLLLQNITLLVHYVDDIMLIGSSEQEVANALDLLVRHLHARGWEINLTKIQGTSTSVKFLGVQWCAACQDSPSKVKDKLLHLAPPATKKEARCLVGLFGFWRQHIPHL

SEQ ID NO: 34031 - protein, 61 aa, Homo sapiens
  MAP TO AL162471.1; EXPRESSED IN HELA, SIGNAL = 0.28
MALLGSQHSGAPSAAGPPGGTSSAATAAVLSFSTVATAALGNLSDASGGGTAAAPGGGGLG

SEQ ID NO: 34032 - protein, 54 aa, Homo sapiens
  MAP TO AL162471.1; EXPRESSED IN HELA, SIGNAL = 0.28
WRSRRRPAHQRAWPYWAASTPAPPPRPAHLAGLPPRPRRPCSPSAPWRPRRWGT

SEQ ID NO: 34033 - protein, 226 aa, Homo sapiens
  MAP TO AL121673.27; EXPRESSED IN HELA, SIGNAL = 0.96; SWISSPROT HIT: Q63003, EVALUE 4.00e-03
TTKALIPKEEPRLPAILGTTMLTQGQAQSLDQARSWCTHSISAAFPTWALRTGNVRGTRAPWTGNARGSWAPPTGNVRGTRALPTGNVRGTGALQTGNVRGTWALRTGNVRGTWARLTGNVRGTRARPTGNVRGTWALWTGNVRGTRARLTGNARGTRALRTGNARGTRALPTGNVRGTWARPTGNARGTRALWTGNVRGSWALWTGNARGTRARRTGNVRGTQAR

SEQ ID NO: 34034 - protein, 236 aa, Homo sapiens
  MAP TO AC006994.2; EXPRESSED IN HELA, SIGNAL = 0.62; SWISSPROT HIT: P40223, EVALUE 6.10e-01
FQYLSTGIAMTPALREATAKGISFSSLPSTMESDKMLYMESPRTVDEKLKGDTFSQMLGFPTPEPTLNTNFVNLKHFGSPQSSKHYQTVFLMRSNSTLNKHNENYKQKKLGEPSCNKLKNILYNGSNIQLSKICLSHSEEFIKKEPLSDTTSQCMKDVQIILDSNITKDTNVDKVQLQNCKWYQENALLDKVTDAEIKKGLLHCTQKKIVPGHSNVPVSSSAAEKEEEVHARLLHC

SEQ ID NO: 34035 - protein, 27 aa, Homo sapiens
  MAP TO AC006994.2; EXPRESSED IN HELA, SIGNAL = 0.62
QQRVSAFHLCQVPWSLTRCSTWKVPEL

SEQ ID NO: 34036 - protein, 140 aa, Homo sapiens
  MAP TO AL137790.1; EXPRESSED IN HELA, SIGNAL = 0.98; SWISSPROT HIT: Q9CFC0, EVALUE 1.00e+01
MARASLVGAQSLQGQLPLIVAGLVAGPRAAAASVRALEDVERLLGVAVLPVGHPAAGFHVGLVDAPEGELLFEERPAHVRGAVQLAGAVVVEHVGEDARVPVEEELAAPAAAAAAATHTAAIGLGPAPAVGVGQPGEAGS

SEQ ID NO: 34037 - protein, 33 aa, Homo sapiens
  MAP TO AC005523.1; EXPRESSED IN HELA, SIGNAL = 0.48
WTSAPPCTTPPVMASCSCSRSCSAAGAGRNWTS

SEQ ID NO: 34038 - protein, 37 aa, Homo sapiens
  MAP TO AC005523.1; EXPRESSED IN HELA, SIGNAL = 0.48; SWISSPROT HIT: Q08264, EVALUE 5.00e+00
WSCVTRGASTCPNRSPHSWSWPMTIPGRSTPPRSWRR

SEQ ID NO: 34039 - protein, 669 aa, Homo sapiens
  MAP TO AC005523.1; EXPRESSED IN HELA, SIGNAL = 0.48; SWISSPROT HIT: P17221, EVALUE 2.00e-71
MDLRTAVYNAARDGKLQLLQKLLSGRSREELDELTGEVAGGGTPLLIAARYGHLDVVEYLVDRCGASVEAGGSVHFDGETIEGAPPLWAASAAGHLDVVRSLLRRGASVNRTTRTNSTPLRAACFDGHLEVVRYLVGEHQADLEVANRHGHTCLMISCYKGHREIARYLLEQGAQVNRRSAKGNTALHDCAESGSLEILQLLLGCKARMERDGYGMTPLLAASVTGHTNIVEYLIQEQPGQEQVAGGEAQPGLPQEDPSTSQGCAQPQGAPCCSSSPEEPLNGESYESCCPTSREAAVEALELLGATYVDKKRDLLGALKHWRRAMELRHQGGEYLPKPEPPQLVLAYDYSREVNTTEELEALITDPDEMRMQALLIRERILGPSHPDTSYYIRYRGAVYADSGNFERCIRLWKYALDMQQSNLEPLSPMTASSFLSFAELFSYVLQDRAAKGSLGTQIGFADLMGVLTKGVREVERALQLPREPGDSAQFTKALAIILHLLYLLEKVECTPSQEHLKHQTVYRLLKCAPRGKNGFTPLHMAVDKDTTNVGRYPVGRFPSLHVVKVLLDCGADPDSRDFDNNTPLHIAAQNNCPAIMNALIEAGAHMDATNAFKKTAYELLDEKLLARGTMQPFNYVTLQCLAARALDKNKIPYKGFIPEDLEAFIELH

SEQ ID NO: 34040 - protein, 194 aa, Homo sapiens
  MAP TO AF230667.1; EXPRESSED IN HELA, SIGNAL = 0.72; SWISSPROT HIT: P01266, EVALUE 1.00e-111
PTPCQLQSEQAFLRTVQALLSNSSMLPTLSDTYIPQCSTDGQWRQVQCNGPPEHVFELYQRWEAQNKGQDLTPAKLLVKIMSYREAASGNFSLFIQSLYEAGQQDVFPVLSQYPSLQDVPLAALEGKRPQPRENILLEPYLFWQILNGQLSQYPGSYSDFSTPLAHFDLRNCWCVDEAGQELEGMRSEPSKLPT

SEQ ID NO: 34041 - protein, 71 aa, Homo sapiens
  MAP TO AF230667.1; EXPRESSED IN HELA, SIGNAL = 0.72; SWISSPROT HIT: P35455, EVALUE 2.80e-01
APRPVNYSLSKLSSGRCRPCSLTPACYPPFPTPTSHSAAPMGSGDKCNAMGLLSMSSSCTNDGRLRTRARI

SEQ ID NO: 34042 - protein, 805 aa, Homo sapiens
  MAP TO AL049732.11; EXPRESSED IN HELA, SIGNAL =   1; SWISSPROT HIT: Q12816, EVALUE 0.00e+00
VQKKDPKDWAVQYREAVEMEVQAAAVAVAEAEARAEARAQMGIGEEAVAGPWNWDDMDIDCLTREELGDDAQAWSRFSFEIEARAQENADASTNVNFSRGASTRAGFSDGASISFNGAPSSSGGFSGGPGITFGVAPSTSASFSNTASISFGGTLSTSSSFSSAASISFGCAHSTSTSFSSEASISFGGMPCTSASFSGGVSSSFSGPLSTSATFSGGASSGFGGTLSTTAGFSGVLSTSTSFGSAPTTSTVFSSALSTSTGFGGILSTSVCFGGSPSSSGSFGGTLSTSICFGGSPCTSTGFGGTLSTSVSFGGSSSTSANFGGTLSTSICFDGSPSTGAGFGGALNTSASFGSVLNTSTGFGGAMSTSADFGGTLSTSVCFGGSPGTSVSFGSALNTNAGYGGAVSTNTDFGGTLSTSVCFGGSPSTSAGFGGALNTNASFGCAVSTSASFSGAVSTSACFSGAPITNPGFGGAFSTSAGFGGALSTAADFGGTPSNSIGFGAAPSTSVSFGGAHGTSLCFGGAPSTSLCFGSASNTNLCFGGPPSTSACFSGATSPSFCDGPSTSTGFSFGNGLSTNAGFGGGLNTSAGFGGGLGTSAGFSGGLSTSSGFDGGLGTSAGFGGGPGTSTGFGGGLGTSAGFSGGLGTSAGFGGGLVTSDGFGGGLGTNASFGSTLGTSAGFSGGLSTSDGFGSRPNASFDRGLSTIIGFGSGSNTSTGFTGEPSTSTGFSSGPSSIVGFSGGPSTGVGFCSGPSTSGFSGGPSTGAGFGGGPNTGAGFGGGPSTSAGFGSGAASLGACGFSYG

SEQ ID NO: 34043 - protein, 46 aa, Homo sapiens
  MAP TO AL049732.11; EXPRESSED IN HELA, SIGNAL =   1; SWISSPROT HIT: Q9HUF1, EVALUE 2.80e+00
QWRWKSKLQLWLWLRLKPGLRQEPKWGLERKLWLGPGIGMTWISTA

SEQ ID NO: 34044 - protein, 181 aa, Homo sapiens; identical to SEQ ID NO: 33128
  MAP TO AL008639.10; EXPRESSED IN HELA, SIGNAL = 0.4; SWISSPROT HIT: Q99439, EVALUE 2.00e-46

SEQ ID NO: 34045 - protein, 42 aa, Homo sapiens
  MAP TO AL008639.10; EXPRESSED IN HELA, SIGNAL = 0.4
TSFLPRSRTSSCSNATLRSRRRSAAGSRDSPASLSAPTSRRV

SEQ ID NO: 34046 - protein, 219 aa, Homo sapiens
  MAP TO AP000510.1; EXPRESSED IN HELA, SIGNAL = 0.21; SWISSPROT HIT: Q15517, EVALUE 1.00e-24
TLAKSIGTFSDPCKDPTRITSPNDPCLTGKGDSSGFSSYSGSSSSGSSISSARSSGGGSSGSSSGSSIAQGGSAGSFKPGTGYSQVSYSSGSGSSLQGASGSSQLGSSSSHSGSSGSHSGSSSSHSSSSSSFQFSSSSFQVGNGSALPTNDNSYRGILNPSQPGQSSSSSQTSGVSSSGQSVSSNQRPCSSDIPDSPCSGGPIVSHSGPYIPSSHSVSG

SEQ ID NO: 34047 - protein, 195 aa, Homo sapiens
  MAP TO AC025740.1; EXPRESSED IN HELA, SIGNAL = 0.95; SWISSPROT HIT: P40225, EVALUE 3.40e+00
EFLAQTQAPEKGNIAHGLYVQTVRLSIPNLWRQKARFHVLPMKWGESCQCWREGSIISGIATAVSNSLSATGKRHMVPDSLFPGLSPHPEPFAGWERALNVRHTAPGPIYLQRPGPMWKHPSGIWFFSASQVLVFPHPPTPAPGSLLLKTMNQVEFPGLRGELELGILLLLPVHLELLLGLSFFICKIKIQKNLL

SEQ ID NO: 34048 - protein, 18 aa, Homo sapiens
  MAP TO AC004760.1; EXPRESSED IN HELA, SIGNAL = 0.78
TTTSASTAITRRAMPIRW

SEQ ID NO: 34049 - protein, 718 aa, Homo sapiens
  MAP TO AC004760.1; EXPRESSED IN HELA, SIGNAL = 0.78; SWISSPROT HIT: Q92793, EVALUE 0.00e+00
DYDLCINCYNTKSHAHKMVKWGLGLDDEGSSQGEPQSKSPQESRRLSIQRCIQSLVHACQCRNANCSLPSCQKMKRVVQHTKGCKRKTNGGCPVCKQLIALCCYHAKHCQENKCPVPFCLNIKHKLRQQQIQHRLQQAQLMRRRMATMNTRNVPQQSLPSPTSAPPGTPTQQPSTPQTPQPPAQPQPSPVSMSPAGFPSVARTQPPTTVSTGKPTSQVPAPPPPAQPPPAAVEAARQIEREAQQQQHLYRVNINNSMPPGRTGMGTPGSQMAPVSLNVPRPNQVSGPVMPSMPPGQWQQAPLPQQQPMPGLPRPVISMQAQAAVAGPRMPSVQPPRSISPSALQDLLRTLKSPSSPQQQQQVLNILKSNPQLMAAFIKQRTAKYVANQPGMQPQPGLQSQPGMQPQPGMHQQPSLQNLNAMQAGVPRPGVPPQQQAMGGLNPQGQALNIMNPGHNPNMASMNPQYREMLRRQLLQQQQQQQQQQQQQQQQQQGSAGMAGGMAGHGQFQQPQGPGGYPPAMQQQQRMQQHLPLQGSSMGQMAAQMGQLGQMGQPGLGADSTPNIQQALQQRILQQQQMKQQIGSPGQPNPMSPQQHMLSGQPQASHLPGQQIATSLSNQVRSPAPVQSPRPQSQPPHSSPSPRIQPQPSPHHVSPQTGSPHPGLAVTMASSIDQGHLGNPEQSAMLPQLNTPSRSALSSELSLVGDTTGDTLEKFVEGL

SEQ ID NO: 34050 - protein, 83 aa, Homo sapiens
  MAP TO AC023120.3; EXPRESSED IN HELA, SIGNAL = 0.44; SWISSPROT HIT: P38297, EVALUE 2.30e+00
DRPVTVFFERKGSPCQSSTVKELSKTDRMGTQLNVACKLSNNRISKREHFRPTQSYSHNSDDLSREGNARPIFFTPKDNMSIP

SEQ ID NO: 34051 - protein, 25 aa, Homo sapiens
  MAP TO AC023120.3; EXPRESSED IN HELA, SIGNAL = 0.44
KLLLWISTGKLEGITAQEKIRLFLL

SEQ ID NO: 34052 - protein, 211 aa, Homo sapiens
  MAP TO AC003005.1; EXPRESSED IN HELA, SIGNAL = 0.59; SWISSPROT HIT: P52741, EVALUE 2.00e-58
SWQGAKAEAAAEQSASVEVPSSNVQQHQKQHCGEKPLKRQEGRVPVLRSCRVHLSEKSLQSREVGKDLLTSSGVLKHQVTHTGEKSHRSSKSREAFHAGKRHYKCSECGKAFGQKYLLVQHQRLHTGEKPYECSECGKLFSHKSNLFIHQIVHTGERPYGCSDCGKSFSRNADLIQHQRVHTGEKPFTCSECGKAFRHNSTLVQHHRIHTG

SEQ ID NO: 34053 - protein, 17 aa, Homo sapiens
  MAP TO AC003005.1; EXPRESSED IN HELA, SIGNAL = 0.59
VVGKEPRLRQLLSRVLL

SEQ ID NO: 34054 - protein, 173 aa, Homo sapiens
  MAP TO AC007731.8; EXPRESSED IN HELA, SIGNAL = 0.83; SWISSPROT HIT: Q61001, EVALUE 4.00e-18
CPRQFWGPDCKELCSCHPHGQCEDVTGQCTCHARRWGARCEHACQCQHGTCHPRSGACRCEPGWWGAQCASACYCSATSRCDPQTGACLCHAGWWGRSCNNQCACNSSPCEQQSGRCQCRERTFGARCDRYCQCFRGRCHPVDGTCACEPGYRGKYCREPCPAGFYGLGCRRR

SEQ ID NO: 34055 - protein, 117 aa, Homo sapiens
  MAP TO AC004595.1; EXPRESSED IN HELA, SIGNAL = 0.86; SWISSPROT HIT: P23098, EVALUE 2.60e-02
MAAQVAAREARDFREAPTLRLTSGAGLEAVGAVELEEEEENEEEAAARRARSFAQDARVRFLGGRLAMMLGFTEEKWSQYLESEDNRQVLGEFLESTSPACLVFSFAASGRLAASQE

SEQ ID NO: 34056 - protein, 27 aa, Homo sapiens
  MAP TO AC007228.1; EXPRESSED IN HELA, SIGNAL = 0.54
QKECGNQAAGQRGRGEMQVQSGSHWEF

SEQ ID NO: 34057 - protein, 495 aa, Homo sapiens
  MAP TO AC007228.1; EXPRESSED IN HELA, SIGNAL = 0.54; SWISSPROT HIT: P52742, EVALUE 0.00e+00
WETRPEMKELDPKNDISEDKLSVVGEATGGPTRNGARGPGSEGVWEPGSWPERPRGDAGAEWEPLGIPQGNKLLGGSVPACHELKAFANQGCVLVPPRLDDPTEKGACPPVRRGKNFSSTSDLSKPPMPCEEKKTYDCSECGKAFSRSSSLIKHQRIHTGEKPFECDTCGKHFIERSSLTIHQRVHTGEKPYACGDCGKAFSQRMNLTVHQRTHTGEKPYVCDVCGKAFRKTSSLTQHERIHTGEKPYACGDCGKAFSQNMHLIVHQRTHTGEKPYVCPECGRAFSQNMHLTEHQRTHTGEKPYACKECGKAFNKSSSLTLHQRNHTGEKPYVCGECGKAFSQSSYLIQHQRFHIGVKPFECSECGKAFSKNSSLTQHQRIHTGEKPYECYICKKHFTGRSSLIVHQIVHTGEKPYVCGECGKAFSQSAYLIEHQRIHTGEKPYRCGQCGKSFIKNSSLTVHQRIHTGEKPYRCGECGKTFSRNTNLTRHLRIHT

SEQ ID NO: 34058 - protein, 23 aa, Homo sapiens
  MAP TO AC006596.2; EXPRESSED IN HELA, SIGNAL = 0.17
KAPLLPQRPQSHCHMLCRIPLPV

SEQ ID NO: 34059 - protein, 71 aa, Homo sapiens
  MAP TO AL035427.17; EXPRESSED IN HELA, SIGNAL = 0.48; SWISSPROT HIT: P49406, EVALUE 4.60e+00
VCAEELEPAAGADCKPRSGAEEEEEENVIGNWFWEGDDTSFDPNPKPVSRIVKPQPVYEINEKNRPKDWSE

SEQ ID NO: 34060 - protein, 44 aa, Homo sapiens
  MAP TO AC013685.3; EXPRESSED IN HELA, SIGNAL = 0.64; SWISSPROT HIT: P54728, EVALUE 1.00e-10
MQVTLKTLQPQTLTCKIDIDPEETVKALKEKTESEKGKVASLVA

SEQ ID NO: 34061 - protein, 17 aa, Homo sapiens
  MAP TO AC013685.3; EXPRESSED IN HELA, SIGNAL = 0.64
CKMAQSHWKHFGSFLLK

SEQ ID NO: 34062 - protein, 36 aa, Homo sapiens
  MAP TO U82672.1; EXPRESSED IN HELA, SIGNAL = 0.29
LFPAHHGLGVRPMLLERPTMASKGFVHTWDFTKNEA

SEQ ID NO: 34063 - protein, 213 aa, Homo sapiens
  MAP TO AC005768.16; EXPRESSED IN HELA, SIGNAL = 0.56; SWISSPROT HIT: O15320, EVALUE 5.20e-01
QEEPKDNSSSATDPSFKRKPGRPKKIGPQVVKQIKRPIGRPPKPKIDQTNITVCQNEPFSAGRKSPECLISEVKEGIYKKSITVTVIYGRSRRTKRHVSEGRVNISNLMSLNNNAGDFPTEYNSPRNISEDKIDLGERISAVASLTTESEILGSGFEYVRPIKNKSVIPQPSKNIIRPNQKPLAISRKPGRPAKVKISGISVTINRTSPQERE

SEQ ID NO: 34064 - protein, 235 aa, Homo sapiens
  MAP TO AP001716.1; EXPRESSED IN HELA, SIGNAL = 0.6; SWISSPROT HIT: P48551, EVALUE 1.00e-123
NFHNFLAWPFPNLPPLEAMDMVEVIYINRKKKVWDYNYDDESDSDTEAAPRTSGGGYTMHGLTVRPLGQASATSTESQLIDPESEEEPDLPEVDVELPTMPKDSPQQLELLSGPCERRKSPLQDPFPEEDYSSTEGSGGRITFNVDLNSVFLRVLDDEDSDDLEAPLMLSSHLEEMVDPEDPDNVQSNHLLASGEGTQPTFPSPSSEGLWSEDAPSDQSDTSESDVDLGDGYIMR

SEQ ID NO: 34065 - protein, 182 aa, Homo sapiens
  MAP TO AL135999.2; EXPRESSED IN HELA, SIGNAL = 0.37; SWISSPROT HIT: P30871, EVALUE 7.00e-02
MAQGLIEVERKFLPGPGTEERLQELGGTLEYRVTFRDTYYDTPELSLMQADHWLRRREDSGWELKCPGAAGVLGPHTEYKELTAEPTIVAQLCKVLRADGLGAGDVAAVLGPLGLQEVASFVTKRSAWKLVLLGADEEEPQLRVDLDTADFGYAVGEVEALVHEEAEVPTALEKIHRLSSML

SEQ ID NO: 34066 - protein, 119 aa, Homo sapiens
  MAP TO AL138846.2; EXPRESSED IN HELA, SIGNAL = 0.19; SWISSPROT HIT: Q61772, EVALUE 2.00e-44
WEEISGVDEHDRPIRTYQVCNVLEPNQDNWLQTGWISRGRGQRIFVELQFTLRDCSSIPGAAGTCKETFNVYYLETEADLGRGRPRLGGSRPRKIDTIAADESFTQGDLGERKMKLNTE

SEQ ID NO: 34067 - protein, 35 aa, Homo sapiens
  MAP TO AL138846.2; EXPRESSED IN HELA, SIGNAL = 0.19
GRRSAAWMNTTVPSARTKCAMCWSPTRTTGCRLAG

SEQ ID NO: 34068 - protein, 330 aa, Homo sapiens
  MAP TO AC002511.1; EXPRESSED IN HELA, SIGNAL = 0.28; SWISSPROT HIT: O15552, EVALUE 0.00e+00
MLPDWKSSLILMAYIIIFLTGLPANLLALRAFVGRIRQPQPAPVHILLLSLTLADLLLLLLLPFKIIEAASNFRWYLPKVVCALTSFGFYSSIYCSTWLLAGISIERYLGVAFPVQYKLSRRPLYGVIAALVAWVMSFGHCTIVIIVQYLNTTEQVRSGNEITCYENFTDNQLDVVLPVRLELCLVLFFIPMAVTIFCYWRFVWIMLSQPLVGAQRRRRAVGLAVVTLLNFLVCFGPYNVSHLVGYHQRKSPWWRSIAVVFSSLNASLDPLLFYFSSSVVRRAFGRGLQVLRNQGSSLLGRRGKDTAEGTNEDRGVGQGEGMPSSDFTTE

SEQ ID NO: 34069 - protein, 37 aa, Homo sapiens
  MAP TO AC002511.1; EXPRESSED IN HELA, SIGNAL = 0.28
WLTSSSSSLASLPTSWPCGPLWGGSASPSLHLCTSSC

SEQ ID NO: 34070 - protein, 156 aa, Homo sapiens
  MAP TO AC005006.2; EXPRESSED IN HELA, SIGNAL = 0.37; SWISSPROT HIT: P26646, EVALUE 7.40e+00
MAALVWLLAGASMSSLNKWIFTVHGFGRPLLLSALHMLVAALACHRGARRPMPGGTRCRVLLLSLTFGTSMACGNVGLRAVPLDLAQLVTTTTPLFTLALSALLLGRRHHPLQLAAMGPLCLGAACSLAGEFRTPPTGCGFLLAATCLRGLKSVQQ

SEQ ID NO: 34071 - protein, 252 aa, Homo sapiens
  MAP TO AC005531.1; EXPRESSED IN HELA, SIGNAL = 0.62
MEESWEAAPGGQAGAELPMEPVGSLVPTLEQPQVPAKVRQPEGPESSPSPAGAVEKAAGAGLEPSSKKKPPSPRPGSPRVPPLSLGYGVCPEPPSPGPALVKLPRNGEAPGAEPAPSAWAPMELQVDVRVKPVGAAGGSSTPSPRPSTRFLKVPVPESPAFSRHADPAHQLLLRAPSQGGTWGRRSPLAAARTESGCDAEGRASPAEGSAGSPGSPTCCRCKELGLEKEDAALLPRAGLDGDEKLPRAVTLT

SEQ ID NO: 34072 - protein, 174 aa, Homo sapiens
  MAP TO AC012678.1; EXPRESSED IN HELA, SIGNAL = 0.51; SWISSPROT HIT: Q61768, EVALUE 1.10e-01
AQKKILSKIASKTVANMLIDDTSSEIFDELYKVTKEHTHNKKEAHKIMKDLIKVAIKIGILYRNNQFSQEELVIVEKFRKKLNQTAMTIVSFYEVEYTFDRNVLSNLLHECKDLVHELVQRHLTPRTHGRINHVFNHFADVEFLSTLYSLDGDCRPNLKRICEGINKLLDEKVL

SEQ ID NO: 34073 - protein, 372 aa, Homo sapiens
  MAP TO U73479.1; EXPRESSED IN HELA, SIGNAL = 0.95; SWISSPROT HIT: Q00899, EVALUE 1.00e-102
MASNEDFSITQDLEIPADIVELHDINVEPLPMEDIPTESVQYEDVDGNWIYGGHNHPPLMVLQPLFTNTGYGDHDQEMLMLQTQEEVVGYCDSDNQLGNDLEDQLALPDSIEDEHFQMTLASLSASAASTSTSTQSRSKKPSKKPSGKSATSTEANPAGSSSSLGTRKWEQKQMQVKTLEGEFSVTMWSPNDNNDQGAVGEGQAENPPDYSEYLKGKKLPPGGLPGIDLSDPKQLAEFTKVKPKRSKGEPPKTVPCSYSGCEKMFRDYAAMRKHLHIHGPRVHVCAECGKAFLESSKLRRHQLVHTGEKPFQCTFEGCGKRFSLDFNLRTHLRIHTGDKPFVCPFDVCNRKFAQSTNLKTHILTHVKTKNNP

SEQ ID NO: 34074 - protein, 58 aa, Homo sapiens
  MAP TO U73479.1; EXPRESSED IN HELA, SIGNAL = 0.95; SWISSPROT HIT: P12252, EVALUE 2.70e+00
WPPTKISPSHKTWRSRQILWSSTTSMWSPFLWRTFRRKASSTRMWMAIGSTVATTIRH

SEQ ID NO: 34075 - protein, 204 aa, Homo sapiens
  MAP TO AC000359.1; EXPRESSED IN HELA, SIGNAL = 0.38; SWISSPROT HIT: Q61553, EVALUE 3.00e-15
TWEILVSNEHETQAVVRLKSVQGLYLLCECDGTVCYGRPRTSHHGCFLLRFHRNSKWTLQCLISGRYLESNGKDVFCTSHVLSAYHMWTPRPALHVHVILYSPIHRCYARADPTMGRIWVDAAVPCLEECGFLLHFRDGCYHLETSTHHFLSHVDRLFSQPSSQTAFHMQVRPGGLVALCDGEGGMLYPQGTHLLLGMGCNPMR

SEQ ID NO: 34076 - protein, 296 aa, Homo sapiens
  MAP TO AC024049.2; EXPRESSED IN HELA, SIGNAL = 0.44; SWISSPROT HIT: P23091, EVALUE 1.00e-19
  unsure 37
MSGYQHHLNPEALNLTPEDAVEALIGSGHHGRTARTXRPPAYELSAAGLRGRRWSGRQWAPATTTAGTTPPTITTPPTTTTTTTTTMAARDTAVRGPPRAPGGALLRRPAGVHVGARAEPAAPRLQQGGGHPAQAEAATLKNRGYAQSCRFKRVQQRHILESEKCQLQSQVEQLKLEVGRLAKERDLYKEKYEKLAGRGRERGRGRFPAGPSPPHGPAGPRDGRLLPVGAGPRARAAVAGDKFAQASRGLGSDSAVQDVDTRPGRRAGPGAKSAGAGLEAPLLPVPVRARRPGSPS

SEQ ID NO: 34077 - protein, 37 aa, Homo sapiens
  MAP TO AC024049.2; EXPRESSED IN HELA, SIGNAL = 0.44
APDPEPAPPSPGTSSRRPLGASARTPRYRTWTPGPAG

SEQ ID NO: 34078 - protein, 203 aa, Homo sapiens
  MAP TO AC003003.1; EXPRESSED IN HELA, SIGNAL = 0.62; SWISSPROT HIT: P21521, EVALUE 2.00e-25
RRPSSPLIDIKPIEFGVLSAKKEPIQPSVLRRTYNPDDYFRKFEPHLYSLDSNSDDVDSLTDEEILSKYQLGMLHFSTQYDLLHNHLTVRVIEARDLPPPISHDGSRQDMAHSNPYVKICLLPDQKNSKQTGVKRKTQKPVFEERYTFEIPFLEAQRRTLLLTVVDFDKFSRHCVIGKVSVPLCEVDLVKGGHWWKALIPSSQ

SEQ ID NO: 34079 - protein, 197 aa, Homo sapiens
  MAP TO AC003966.1; EXPRESSED IN HELA, SIGNAL = 0.43; SWISSPROT HIT: P51815, EVALUE 7.00e-86
LKLKNDTENHQPVSLSDLEIQASAGVISKKAKVKVPQKTAGKENHFDMHRVGKWHQDFPVKKRKKLSTWKQELLKLMDRHKKDCAREKPFKCQECGKTFRVSSDLIKHQRIHTEEKPYKCQQCDKRFRWSSDLNKHLTTHQGIKPYKCSWCGKSFSQNTNLHTHQRTHTGEKPFTCHECGKKFSQNSHLIKHRRTHT

SEQ ID NO: 34080 - protein, 175 aa, Homo sapiens
  MAP TO AC005500.1; EXPRESSED IN HELA, SIGNAL = 0.42; SWISSPROT HIT: P13826, EVALUE 7.00e-04
GGILVSDAVGGDLFSDAVDGVLVSDALDGVLVCDALGGVLVRDALGGILVRDAMGSDLVSDAVGGVLVSDALDGVLVCDTLDFNLVSDALDGVLVSDALDGVLVSDAVGGNLFSDAVDGVLVSNALDGVLVCDALGGVLVRDALGGVLVRDALDGVLLRDAMGGDLVSDALGGVL

SEQ ID NO: 34081 - protein, 19 aa, Homo sapiens
  MAP TO AL139824.7; EXPRESSED IN HELA, SIGNAL = 1.2
APESVDEWVDDGVAHDEDQ

SEQ ID NO: 34082 - protein, 18 aa, Homo sapiens
  MAP TO AL139824.7; EXPRESSED IN HELA, SIGNAL = 1.2
TMNTTPQTPQQTQMATIK

SEQ ID NO: 34083 - protein, 121 aa, Homo sapiens
  MAP TO AL133232.9; EXPRESSED IN HELA, SIGNAL = 0.16
DGDNGGGGGTGDDHGGTDGGNDGDDNDGDDDDGNDGDNSDGDDDGGNGDDGGGGVGDGEGYDSEGDGGDGDGDDADGGDGDGGSDGNGDGYDSDDNGDDGDGNDDDGDNVKILDCFQLQLC

SEQ ID NO: 34084 - protein, 57 aa, Homo sapiens
  MAP TO AL355076.2; EXPRESSED IN HELA, SIGNAL = 2.5; SWISSPROT HIT: Q29099, EVALUE 2.00e-22
AFIKMSTEEAANTMVNYYTSVTPVLRGQPIYIQFSNHKGLKTDSSPNQARDPAALRP

SEQ ID NO: 34085 - protein, 196 aa, Homo sapiens
  MAP TO NM_006994.1; EXPRESSED IN HELA, SIGNAL = 1.4; SWISSPROT HIT: P18892, EVALUE 5.00e-54
DVVLDPDTAHPELFLSEDRRSVRRGPYRQRVPDNPERFDSQPCVLGWESFASGKHYWEVEVENVMVWTVGVCRHSVERKGEVLLIPQNGFWTLEMFGNQYRALSSPERILPLKESLCRVGVFLDYEAGDVSFYNMRDRSHIYTCPRSAFTVPVRPFFRLGSDDSPIFICPALTGASGVMVPEEGLKLHRVGTHQSL

SEQ ID NO: 34086 - protein, 17 aa, Homo sapiens
  MAP TO NM_006994.1; EXPRESSED IN HELA, SIGNAL = 1.4
IQTPLIPSSSCQRTGEV

SEQ ID NO: 34087 - protein, 533 aa, Homo sapiens
  MAP TO AL022312.7; EXPRESSED IN HELA, SIGNAL = 0.38; SWISSPROT HIT: Q09327, EVALUE 0.00e+00
MKMRRYKLFLMFCMAGLCLISFLHFFKTLSYVTFPRELASLSPNLVSSFFWNNAPVTPQASPEPGGPDLLRTPLYSHSPLLQPLPPSKAAEELHRVDLVLPEDTTEYFVRTKAGGVCFKPGTKMLERPPPGRPEEKPEGANGSSARRPPRYLLSARERTGGRGARRKWVECVCLPGWHGPSCGVPTVVQYSNLPTKERLVPREVPRRVINAINVNHEFDLLDVRFHELGDVVDAFVVCESNFTAYGEPRPLKFREMLTNGTFEYIRHKVLYVFLDHFPPGGRQDGWIADDYLRTFLTQDGVSRLRNLRPDDVFIIDDADEIPARDGVLFLKLYDGWTEPFAFHMRKSLYGFFWKQPGTLEVVSGCTVDMLQAVYGLDGIRLRRRQYYTMPNFRQYENRTGHILVQWSLGSPLHFAGWHCSWCFTPEGIYFKLVSAQNGDFPRWGDYEDKRDLNYIRGLIRTGGWFDGTQQEYPPADPSEHMYAPKYLLKNYDRFHYLLDNPYQEPRSTAAGGWRHRGPEGRPPARGKLDEAEV

SEQ ID NO: 34088 - protein, 93 aa, Homo sapiens
  MAP TO AL022312.7; EXPRESSED IN HELA, SIGNAL = 0.38
PAPSQEALTCCVPHSTPTRPCCSRCRPARRPRSSTGWTWCCPRTPPSISCAPRPAASASNPAPRCWRGRPRDGRRRSLRGPTAPRPGGHPGTS

SEQ ID NO: 34089 - protein, 426 aa, Homo sapiens
  MAP TO AC012313.5; EXPRESSED IN HELA, SIGNAL = 0.8; SWISSPROT HIT: Q9Y573, EVALUE 3.00e-09
MAAAEAVHHIHLQNFSRSLLETLNGQRLGGHFCDVTVRIREASLRAHRCVLAAGSPFFQDKLLLGHSEIRVPPVVPAQTVRQLVEFLYSGSLVVAQGEALQVLTAASVLRIQTVIDECTQIIARARAPGTSAPTPLPTPVPPPLAPAQLRHRLRHLLAARPPGHPGAAHSRKQRQPARLQLPAPPTPAKAEGPDADPSLSAAPDDRGDEDDEESDDETDGEDGEGGGPGEGQAPPSFPDCAAGFLTAAADSACEEPPAPTGLADYSGAGRDFLRGAGSAEDVFPDSYVSTWHDEDGAVPEGCPTETPVQPDCILSGSRPPGVKTPGPPVALFPFHLGAPGPPAPPPSAPSGPAPAPPPAFYPTLQPEAAPSTQLGEVPAPSAAPTTAPSGTPARTPGAEPPTYECSHCRKTFSSRKNYTKHMFIHS

SEQ ID NO: 34090 - protein, 34 aa, Homo sapiens
  MAP TO AC012313.5; EXPRESSED IN HELA, SIGNAL = 0.8
WRLQRLCITYTCRTSHALCLRPSMGRGLGDTSVT

SEQ ID NO: 34091 - protein, 99 aa, Homo sapiens
  MAP TO AL121869.18; EXPRESSED IN HELA, SIGNAL = 9.1; SWISSPROT HIT: P05783, EVALUE 1.00e-44
MAGGLAGMGGIQNKKTMQSLNDRLASYLDRVRSLETENRRLESKIREHLENKGPQVKDWSHYCKTIEDLRAQIFANTVDNACIVLHIDNARLAADDFRV

SEQ ID NO: 34092 - protein, 126 aa, Homo sapiens
  MAP TO AP000467.1; EXPRESSED IN HELA, SIGNAL = 1.2; SWISSPROT HIT: P53794, EVALUE 5.00e-68
ASTIFTLDVYKLIRKSASSRELMIVGRIFVAFMVVISIAWVPIIVEMQGGQMYLYIQEVADYLTPPVAALFLLAIFWKRCNEQGAFYGGMAGFVLGAVRLILAFAYRAPECDQPDNRPGFIKDIHY

SEQ ID NO: 34093 - protein, 226 aa, Homo sapiens
  MAP TO AC009288.12; EXPRESSED IN HELA, SIGNAL = 1.2; SWISSPROT HIT: P08673, EVALUE 1.00e-19
PHEDTVHDITNEDATHDIANEDTVHDIANEAADKGIANEDAAQGIANEDAAQGIAKEDAAQGIAKEDAAQGIANEAADKGTANEDAAHGIANEDAAHGIASEDAAHGIASEDAAQGIANEDAAQGTANEDAAHGIANEDAAHGIASEDAAHGIASEDAAQGIANEDAAQGIANEDAVHGIANEDAAQGIANEDAAQGIANEDAAQGIANELYTTSLTRTPYKPSLT

SEQ ID NO: 34094 - protein, 144 aa, Homo sapiens
  MAP TO AC012398.4; EXPRESSED IN HELA, SIGNAL = 0.55
LPMRTPYTTSLTRMPHTISLTRTLSTASLTRPPTRATPTRTPPRASPTRTPPTESPARTPPRASPTRSPPRASPTRTPPRASPTRTPSRASPTRTPPTASPTRTLPTALLTRMPCTASLMRTPYTTSLMRMPYMTSLMTPYKAR

SEQ ID NO: 34095 - protein, 318 aa, Homo sapiens
  MAP TO AC012398.4; EXPRESSED IN HELA, SIGNAL = 0.55; SWISSPROT HIT: P18899, EVALUE 2.00e-06
PHEDTVHNITNEDASHDITNEDAVHGIANEAADKGNANEDAAQGIANEDAAHGIASEDAAQGIANEVAAQGIANEDAAQGIANEDAVQGIANEDAAHGIANEDAAHGIANEDAVHGIANEDSVYDIANEDAIYDIANDTVQGTLKRTLYTTSLMRTPYKALVMRTLYMTSLTRTLYKPSLTRTLYTTSLMTAPYKTSPMRALYTTLLMIPTRHANADTVHDIANEDSVYHIANEGAVYDIANDTVQGTLTRTLYTTSLMRTPYKASVMRTLYTTSLTRTPYKPSLTRTLYTTSLMTAPYKTSPMRALYTTLLMIPTRH

SEQ ID NO: 34096 - protein, 229 aa, Homo sapiens
  MAP TO AC007688.15; EXPRESSED IN HELA, SIGNAL = 0.59; SWISSPROT HIT: Q24738, EVALUE 2.00e-03
VLGLFGLAFAFIIELNQQTAPVRYFLFGVLFALCFSCLLAHASNLVKLVRGCVSFSWTTILCIAIGCSLLQIIIATEYVTLIMTRGMMFVNMTPCQLNVDFVVLLVYVLFLMALTFFVSKATFCGPCENWKQHGRLIFITVLFSIIIWVVWISMLLRGNPQFQRQPQWDDPVVCIALVTNAWVFLLLYIVPELCILYRSCRQECPLQGNACPVTAYQHSFQVENQELSR

SEQ ID NO: 34097 - protein, 21 aa, Homo sapiens
  MAP TO AC007688.15; EXPRESSED IN HELA, SIGNAL = 0.59
HGASFWSPWPYLASWSQFCYS

SEQ ID NO: 34098 - protein, 172 aa, Homo sapiens; identical to SEQ ID NO: 33822
  MAP TO AC016940.7; EXPRESSED IN HELA, SIGNAL = 0.51; SWISSPROT HIT: Q64317, EVALUE 1.40e-01

SEQ ID NO: 34099 - protein, 42 aa, Homo sapiens
  MAP TO AC016940.7; EXPRESSED IN HELA, SIGNAL = 0.51; SWISSPROT HIT: O63071, EVALUE 2.90e+00
STATPIFRETSPGSWRISRERMPSETPLSKRPVSQLQRERIW

SEQ ID NO: 34100 - protein, 91 aa, Homo sapiens
  MAP TO AC016940.7; EXPRESSED IN HELA, SIGNAL = 0.51; SWISSPROT HIT: O14529, EVALUE 3.40e-01
LLQLQFSERQAQAPGEYPEKGCPQKHRSASDPCPNSKEKESGSYKTLPTYLSHQCQERSNQNVSAGSPQCSGAQWHPVLQALWHVVQEECH

SEQ ID NO: 34101 - protein, 212 aa, Homo sapiens
  MAP TO AC005874.2; EXPRESSED IN HELA, SIGNAL =  14; SWISSPROT HIT: P09058, EVALUE 2.00e-97
QRRVMGISQDNWHKRRKTGSKRKPYDKKRKYELGHLAANTKIGPHHIHTVRVWGGNNKYGALRRDMGNFSWGSECCTRKTRITDVVYDAPNSKLVRTKTLVENCFVLTDSTPYHQWYESHYALPLGCKKGAKLTPEEEKTLNKKRSKKIQKKYDEREKNAKISRLLGEQFQQGKLLACVASRLGQCGQAHVYVPGGKEMEFYLRKIKARKGK

SEQ ID NO: 34102 - protein, 267 aa, Homo sapiens
  MAP TO AC013648.3; EXPRESSED IN HELA, SIGNAL = 6.2; SWISSPROT HIT: gi1351900, EVALUE 1.00e-18
KDVTAKDSKFKMPKFKMPSFGMLSPGKSIEVSVDVSAPKMEADMSIPSMQGDLKTTDLRIQAPSADLEVQAGQVDLKLPEGHMPEVAGLKGHLPKVEMPSFKMPKVDLKGPQVDVKGPKLDLKGPKAEVMAPDVEVSLPSVETDVQAPGSMLDGARLEGDLSLAHEDVAGKDSKFQGPKLSTSGFEWSSKKVSMSSSEIEGNVTFHEKTSTFPIVESVVHEGDLHDPSRDGNLGLAVGEVGMDSKFKKLHFKVPKVSFSSTKTPKDS

SEQ ID NO: 34103 - protein, 243 aa, Homo sapiens; identical to SEQ ID NO: 32923
  MAP TO Z97986.3; EXPRESSED IN HELA, SIGNAL = 0.83; SWISSPROT HIT: P27398, EVALUE 3.00e-06

SEQ ID NO: 34104 - protein, 65 aa, Homo sapiens
  MAP TO Z97986.3; EXPRESSED IN HELA, SIGNAL = 0.83; SWISSPROT HIT: P27398, EVALUE 4.00e-03
MATVGEWSCVRCTFLNPAGQRQCSICEAPRHKPDLNHILRLSVEEQKWPCARCTFRNFLGKEACE

SEQ ID NO: 34105 - protein, 19 aa, Homo sapiens
  MAP TO Z97986.3; EXPRESSED IN HELA, SIGNAL = 0.83
WIHSGWRQPPPPPASNAQP

SEQ ID NO: 34106 - protein, 184 aa, Homo sapiens
  MAP TO AC005768.16; EXPRESSED IN HELA, SIGNAL = 0.3; SWISSPROT HIT: P37709, EVALUE 3.00e-08
QDEAEASMEALREAHQEELQNAVAETKARLLQEQGCAEEEALLQRIQALESALELQKRLTEEALAESASCRLETKERELRVEAEHAERVLTLSREMLELKADYERRLQHLTSHEATPQGRLPQESPETKSEPGQGPEMQEVLLEVQRLRVENQQLSKDYARKAEELQATYERENEAIRQAMQQS

SEQ ID NO: 34107 - protein, 224 aa, Homo sapiens
  MAP TO Z98885.1; EXPRESSED IN HELA, SIGNAL = 0.69; SWISSPROT HIT: Q17391, EVALUE 3.40e-01
PLERDKQANKMMHKTQINKETHVIIRLLAENMERPIILLVNLEMQTKYTPNRHQRSYVAILSDGKMAEQYPAGQNVEWDNYLVNILVIRRYPVKVDMFISYLLLQNKPPPKLCSSKQQSFLLFTHLLFGQDSAGTTRLLPASLSGAPPLGAGGATSKMVHSRGWDLDPGSGLRALGTSSWNSSHAAGARVSREAGGTCITFHILASEVTRITSAIGTSLSRFKS

SEQ ID NO: 34108 - protein, 54 aa, Homo sapiens
  MAP TO Z98885.1; EXPRESSED IN HELA, SIGNAL = 0.69
NTQRWQDGRAIPCWPECRVGQLFGKYLGHKALPSESGHVYQLPLAAKQTTPKTL

SEQ ID NO: 34109 - protein, 205 aa, Homo sapiens
  MAP TO AL008726.1; EXPRESSED IN HELA, SIGNAL = 0.66; SWISSPROT HIT: Q63788, EVALUE 1.50e-01
VFQLLVAHGQPSQGQQGAVWARGGAQLGLQLPGIGPECQSLTIEASTGEALCPPQLRQHEEVLQVRGMAQLRHCLQVTQKLLKGPATAGNGLCSKIPAQPLTGEGDGSHWAPELPLQVSVQPLKVRVTARDLGWLAIWRSWADHGEGVELQGGWVSGQMQVVHGPVPSPSFPIPHTPSCTSPPLPFTPGTAPRRAGAAAQWRGSP

SEQ ID NO: 34110 - protein, 353 aa, Homo sapiens
  MAP TO AC004659.1; EXPRESSED IN HELA, SIGNAL = 0.3; SWISSPROT HIT: O60412, EVALUE 0.00e+00
GLNKGYCSHSGECLFGVNFVWLFFFLLLGKPSGPMERGNQTEVGNFLLLGFAEDSDMQLLLHGLFLSMYLVTIIGNLLIILTISSDSHLHTPMYFFLSNLSFADICFTSTTVPKMLVNIQTQSKMITFAGCLTQIFFFIAFGCLDNLLLTMTAYDRFVAICYPLHYTVIMNPRLCGLLVLGSWCISVMGSLLETLTILRLSFCTNMEIPHFFCDPSEVLKLACSDTFINNIVMYFVTIVLGVFPLCGILFSYSQIFSSVLRVSARGQHKAFSTCGSHLSVVSLFYGTGLGVYLSSAVTPPSRTSLAASVMYTMVTPMLNPFIYSLRNKDMKGSLGRLLLRATSLKEGTIAKLS

SEQ ID NO: 34111 - protein, 91 aa, Homo sapiens
  MAP TO AC010328.4; EXPRESSED IN HELA, SIGNAL = 0.44; SWISSPROT HIT: P53857, EVALUE 1.70e+00
IPPKCTIKDLLPKEKSSTEAVFHTVVLERHESPDIEDFSFKEPQKNVHDFECQWRDDTGNYKGVLMAQKEGKRDQRDRRDIENKLMNNQLG

SEQ ID NO: 34112 - protein, 514 aa, Homo sapiens
  MAP TO AC010328.4; EXPRESSED IN HELA, SIGNAL = 0.44; SWISSPROT HIT: Q05481, EVALUE 0.00e+00
VIHTGEKPYKCHECGKVFRHNSYLATHRRIHTGEKPYKCNECGKAFRGHSNLTTHQLIHTGEKPFKCNECGKLFTQNSHLISHWRIHTGEKPYKCNECGKAFSVRSSLAIHQTIHTGEKPYKCNECGKVFRYNSYLGRHRRVHTGEKPYKCNECGKAFSMHSNLATHQVIHTGTKPFKCNECSKVFTQNSQLANHRRIHTGEKPYKCNECGKAFSVRSSLTTHQAIHSGEKPYKCIECGKSFTQKSHLRSHRGIHSGEKPYKCNECGKVFAQTSQLARHWRVHTGEKPYKCNDCGRAFSDRSSLTFHQAIHTGEKPYKCHECGKVFRHNSYLATHRRIHTGEKPYKCNECGKAFSMHSNLTTHKVIHTGEKPYKCNQCGKVFTQNSHLANHQRTHTGEKPYRCNECGKAFSVRSSLTTHQAIHTGKKPYKCNECGKVFTQNAHLANHRRIHTGEKPYRCTECGKAFRVRSSLTTHMAIHTGEKRYKCNECGKVFRQSSNLASHHRMHTGEKPYK

SEQ ID NO: 34113 - protein, 81 aa, Homo sapiens
  MAP TO AC010328.4; EXPRESSED IN HELA, SIGNAL = 0.44; SWISSPROT HIT: P40020, EVALUE 3.10e+00
ISLLNVQSRICYQKRRAVQKQYSTQWCWKDTKALTLKTFPSRNPRKMCMILSVNGEMTQEITRECLWPRKKVKEINATEET

SEQ ID NO: 34114 - protein, 189 aa, Homo sapiens
  MAP TO AC004231.1; EXPRESSED IN HELA, SIGNAL = 0.42; SWISSPROT HIT: Q99456, EVALUE 2.00e-31
MDLSNNTMSLSVRTPGLSRRLSSQSVIGRPRGMSASSVGSGYGGSAFGFGASCGGGFSAASMFGSSSGFGGGSGSSMAGGLGAGYGRALGGGSFGGLGMGFGGSPGGGSLGILSGNDGGLLSGSEKETMQNLNDRLASYLDKVRALEEANTELENKIREWYETRGTGTADASQSDYSKYYPLIEDLRNK

SEQ ID NO: 34115 - protein, 19 aa, Homo sapiens
  MAP TO AC004231.1; EXPRESSED IN HELA, SIGNAL = 0.42
RKFHGRRTGCWLWESPGWR

SEQ ID NO: 34116 - protein, 112 aa, Homo sapiens
  MAP TO AC009079.4; EXPRESSED IN HELA, SIGNAL = 0.35
MAASEAAAAAGSAALAAGARAVPAATTGAAAAASGPWVPPGPRLRGSRPRPAGATQQPAVPAPPAGELIQPSVSELSRAVRTNILCTVRGCGKILPNSPALNMHLVKSHRLQ

SEQ ID NO: 34117 - protein, 37 aa, Homo sapiens
  MAP TO AC009079.4; EXPRESSED IN HELA, SIGNAL = 0.35
RRRRGPRLWRRVPGPSRRPRQEPPPPPRARGCPRDPD

SEQ ID NO: 34118 - protein, 26 aa, Homo sapiens
  MAP TO AL079300.11; EXPRESSED IN HELA, SIGNAL = 0.48
VPSEPHRPGPVRTARKKKKRLLLVPG

SEQ ID NO: 34119 - protein, 49 aa, Homo sapiens
  MAP TO AC006427.13; EXPRESSED IN HELA, SIGNAL = 0.38
GLKDSDPLLTVPLGNPRFPLCTALVEVLHEGSSPAADFCQDIQAFPCIL

SEQ ID NO: 34120 - protein, 40 aa, Homo sapiens
  MAP TO AC007841.1; EXPRESSED IN HELA, SIGNAL = 2.2; SWISSPROT HIT: P54425, EVALUE 1.70e+00
PPLHGIWIQLEQSERLGTFSYGKRSFPPLPGHSPSILALL

SEQ ID NO: 34121 - protein, 41 aa, Homo sapiens
  MAP TO AC007363.3; EXPRESSED IN HELA, SIGNAL = 0.23
PGLCMCILSFPSAGELHILYPKVRAPISNTFWNVVGDKTYH

SEQ ID NO: 34122 - protein, 32 aa, Homo sapiens
  MAP TO AC007841.1; EXPRESSED IN HELA, SIGNAL = 0.41
KNWGEASVATRLGKGKSVMWQGPDYLELHRPQ

SEQ ID NO: 34123 - protein, 17 aa, Homo sapiens
  MAP TO AC007281.3; EXPRESSED IN HELA, SIGNAL = 1.1
LVRWTDGVLSVLSLPHI

SEQ ID NO: 34124 - protein, 42 aa, Homo sapiens
  MAP TO Z86090.10; EXPRESSED IN HELA, SIGNAL = 0.83
RKCPISVTYYLTPLTWAFFFFFFLTSDRTLNTVVCMERIERR

SEQ ID NO: 34125 - protein, 93 aa, Homo sapiens
  MAP TO AC004032.7; EXPRESSED IN HELA, SIGNAL = 0.43; SWISSPROT HIT: P00993, EVALUE 7.30e+00
EGQDKECLSDPSPTQARSSPQVLSLELQHLLLKQHTPRAVFLLLEPFLGNVGLPPEQELCEGKVDVFYHSPLCLSCSLLRFQDLVKGRDGQKC

SEQ ID NO: 34126 - protein, 45 aa, Homo sapiens
  MAP TO AB016897.1; EXPRESSED IN HELA, SIGNAL = 1.1; SWISSPROT HIT: P05683, EVALUE 4.90e+00
LLFMGVGKPFWERARELIFSSLKATWSPTQSSSFALEEEAAIHSL

SEQ ID NO: 34127 - protein, 178 aa, Homo sapiens
  MAP TO AC005300.10; EXPRESSED IN HELA, SIGNAL = 0.27; SWISSPROT HIT: P50240, EVALUE 2.90e-01
PREWWLHTESRAAWGRGFKEPRLRAAVGARSCPLTKGEMPFLLPGVGSCLCGISGNGPLGVHLLCSFPTSPLPHSCLPSLGASHTPPGCGHCVSFVSGQSLRSPHSPRPAEQYCCSLISRVLPRCLGRRSGGAGSEALHWSLLFCFLCCPHEAWHVTQPPTTCTWPGHSLCSGSFPDC

SEQ ID NO: 34128 - protein, 51 aa, Homo sapiens
  MAP TO AC004624.6; EXPRESSED IN HELA, SIGNAL = 0.53
PVWTSHPGGMFLLIRRTEWSHCAFGNVNEVEKGCPTNQPFLFLGFKSGQGQ

SEQ ID NO: 34129 - protein, 55 aa, Homo sapiens
  MAP TO AC004624.6; EXPRESSED IN HELA, SIGNAL = 0.46; SWISSPROT HIT: Q04781, EVALUE 8.10e+00
DGQPRRKFPKFLSDDVPVVILGWVGWRHLQKKPPAHRMPLPNFCAGRRLELEWMK

SEQ ID NO: 34130 - protein, 17 aa, Homo sapiens
  MAP TO AC008022.1; EXPRESSED IN HELA, SIGNAL = 0.71
GWFSESGLEVRSPVFHN

SEQ ID NO: 34131 - protein, 83 aa, Homo sapiens
  MAP TO Z82188.2; EXPRESSED IN HELA, SIGNAL = 0.49; SWISSPROT HIT: Q12986, EVALUE 1.20e+00
ISCHHDPFQASIVMSLNLRSGRHACSRLWCKLAPATIGCGAEGTSLLIDSCKEPCPVLRTTERARECFPSSSHPLRSHSSGPG

SEQ ID NO: 34132 - protein, 54 aa, Homo sapiens
  MAP TO AB016897.1; EXPRESSED IN HELA, SIGNAL = 0.63
VRGEGKGRTGTRTSVWGQKNSEPGGSITSATSHRSFDIFSHLFIVFSVLKGIFF

SEQ ID NO: 34133 - protein, 40 aa, Homo sapiens
  MAP TO AC006548.19; EXPRESSED IN HELA, SIGNAL = 0.53
SLTPIIAMVLNIERSIILFLFNYLFQSWKKGYFGRFLRRY

SEQ ID NO: 34134 - protein, 50 aa, Homo sapiens
  MAP TO AC007539.8; EXPRESSED IN HELA, SIGNAL = 1.2
RRQLESGHKSFNIWSPRGTCPMHFLDTVISTGLGAHFQRAGEAGGLCLSK

SEQ ID NO: 34135 - protein, 71 aa, Homo sapiens
  MAP TO AL022319.2; EXPRESSED IN HELA, SIGNAL = 1.4; SWISSPROT HIT: P34404, EVALUE 3.90e+00
FLMFLLGPGPAWPQLLVPSALLSPSPGHGMLTEAVGEEELLSQEGGWLHRHRPGPLRNRPQKRTLLKACLE

SEQ ID NO: 34136 - protein, 17 aa, Homo sapiens
  MAP TO AP000359.1; EXPRESSED IN HELA, SIGNAL = 0.47
KPRKQDNRNRTIGAQVM

SEQ ID NO: 34137 - protein, 44 aa, Homo sapiens
  MAP TO AL022329.9; EXPRESSED IN HELA, SIGNAL = 0.33; SWISSPROT HIT: P18667, EVALUE 4.90e+00
EIEAILGAPESQWKVSKRRVTKSDGPFYRILLAGDADPVGGRGG

SEQ ID NO: 34138 - protein, 138 aa, Homo sapiens
  MAP TO AP000344.1; EXPRESSED IN HELA, SIGNAL = 0.67; SWISSPROT HIT: Q14814, EVALUE 1.40e-02
ALLTWQSWNGGRAHTPWPTCSTDVLQRSPALQGRPSLLPEGQVSPRPGQASRGLDWSAVATMDAASVFIKSECLSLPQGTRQPHGRYVCRLDRWQLGPARQRERKPEPARRQPHKYFQPQPTCLTDNLLFKKLRSNFK

SEQ ID NO: 34139 - protein, 41 aa, Homo sapiens
  MAP TO AL035701.13; EXPRESSED IN HELA, SIGNAL = 1.1; SWISSPROT HIT: P33906, EVALUE 4.90e+00
ATKVVRQGGFGHDGVRREGMRREETRPTVNKEGLGPGEGHF

SEQ ID NO: 34140 - protein, 110 aa, Homo sapiens
  MAP TO AB016897.1; EXPRESSED IN HELA, SIGNAL = 0.65; SWISSPROT HIT: P48023, EVALUE 5.40e-01
CLGSLTEVLTQYIWDFYFQSSTCDFMPLKYLRNRKSSVSPISVGRAAHCTVGRCWARAVFPSIVDFLTMLAQAQSLSSPPVKWDHPPNLLSRPTFWKLNYHEHMVENVGR

SEQ ID NO: 34141 - protein, 97 aa, Homo sapiens
  MAP TO AL035701.13; EXPRESSED IN HELA, SIGNAL = 0.34; SWISSPROT HIT: Q08470, EVALUE 2.90e+00
ATRICFAMIQAAILSATSGWHTFLNSIGGWGSHSVVFLHVHINKFVCLFSNSSELIFFSKTSEGKGEVFLWLLLFCCCEQDSKAPLFWKLQLREPRT

SEQ ID NO: 34142 - protein, 32 aa, Homo sapiens
  MAP TO AP000344.1; EXPRESSED IN HELA, SIGNAL = 0.94; SWISSPROT HIT: P54883, EVALUE 3.90e+00
LIQPKGCDVWQRQKRKGQVFRERSPSNNTALS

SEQ ID NO: 34143 - protein, 140 aa, Homo sapiens
  MAP TO AC004578.3; EXPRESSED IN HELA, SIGNAL = 0.33; SWISSPROT HIT: Q10018, EVALUE 4.00e-09
DLYPHCGHPWLLFRPVSPLRTPLTLFRPVSPLRTPLTPFRPVSPPWTPLATVQTCIPTADTPDAVQTCIPAADTPDAVQTCIPTADTPDAVQTCIPAADTPDAVQTCIPAADTPDAVQTCIPTADTPGCCSDLYPHCGHP

SEQ ID NO: 34144 - protein, 30 aa, Homo sapiens
  MAP TO AC008151.1; EXPRESSED IN LUNG, SIGNAL =   2; EXPRESSED IN HELA, SIGNAL = 3.2
ELAHPRRTSLSRVRKTPRCQIIKNTENKKA

SEQ ID NO: 34145 - protein, 46 aa, Homo sapiens
  MAP TO AC007363.3; EXPRESSED IN HELA, SIGNAL = 0.39
DSTGAQSMEHCFLLSPWPRFLPPLQPPEVQPGTESSADFQGKSELR

SEQ ID NO: 34146 - protein, 148 aa, Homo sapiens
  MAP TO AL031295.1; EXPRESSED IN HELA, SIGNAL = 1.7
PHAPCPARPKPQAAHLGAVGPLLPRLEDAAAAALAALVKALQPLQVDAQVQAVGQAALLGRLLPFGGAAAATPAVAVTVRHGNAATCASSRPHRRARSARLASDQLRAVQLRQLSAPRLPRRKKRRCAAHARGEKAGGRGGWGRAELT

SEQ ID NO: 34147 - protein, 20 aa, Homo sapiens
  MAP TO AC009290.1; EXPRESSED IN HELA, SIGNAL = 1.6
KSDRSFLQNILIFSPLLSTC

SEQ ID NO: 34148 - protein, 31 aa, Homo sapiens
  MAP TO AC008022.1; EXPRESSED IN HELA, SIGNAL = 0.45
WVFRELYFPSLCYLLNAFLPSTYSTKRCRWH

SEQ ID NO: 34149 - protein, 157 aa, Homo sapiens
  MAP TO AL022315.1; EXPRESSED IN HELA, SIGNAL = 0.7; SWISSPROT HIT: P37709, EVALUE 2.00e-04
SVPCSVLADEEGPEGLTQFLMTEVRRLREARKSQLQREQQLQARGRVLEEERAGLEQRLRDQQQAQERCQRLREDWEAGSLELLRLKDENYMIAMRLAQLSEEKNSAVLRSRDLQLAVGPGEMGRGGKGRGSFCNVVASQPVSQSHHCWLFDVDKSF

SEQ ID NO: 34150 - protein, 24 aa, Homo sapiens
  MAP TO AC007281.3; EXPRESSED IN HELA, SIGNAL = 1.7
SFVPQEGPECLSVDKTTSVGTSLT

SEQ ID NO: 34151 - protein, 153 aa, Homo sapiens
  MAP TO AL034406.1; EXPRESSED IN HELA, SIGNAL = 1.7; SWISSPROT HIT: P08548, EVALUE 1.00e-12
NTLKNMIQLYAGNKKLSFKNKYRIKGVKKKIFHANENQKPAGVAIFISDTTDFKSKTVKKKDNSSAIDKMINSARGYHDSKNISTQHGRTIYRIFYLTTTEYSFFSSAHGTVSKIDHILGHRTNINTFLKFKFISSIFSDHNGIKLKITEKEN

SEQ ID NO: 34152 - protein, 69 aa, Homo sapiens
  MAP TO AP000347.1; EXPRESSED IN HELA, SIGNAL = 0.58; SWISSPROT HIT: gi2851448, EVALUE 1.20e+00
SAPSHTAPLRNGPNVASKALSVSTGWDLPHLCIWENKALVGQEGSSWHRNLQAERGRDLPKATRQDSDP

SEQ ID NO: 34153 - protein, 42 aa, Homo sapiens
  MAP TO AC007106.6; EXPRESSED IN HELA, SIGNAL = 0.53; SWISSPROT HIT: P38691, EVALUE 6.40e+00
LMSPKLSESLSNSYAISCLYQVEQMWKCFRFENKARTLSWLA

SEQ ID NO: 34154 - protein, 114 aa, Homo sapiens
  MAP TO AL031781.1; EXPRESSED IN HELA, SIGNAL = 1.1; SWISSPROT HIT: P97863, EVALUE 4.30e-01
ISLLTVAALAFSLAATAQAAPRIITGPAPVLPPAALRTPTPAGPTIMPLIRQIQTAVMPNGTPHPTAAIVPPGPEAGLIYTPYEYPYTLAPATSILEYPIEPSGVLGKFFSPWG

SEQ ID NO: 34155 - protein, 151 aa, Homo sapiens
  MAP TO AL022318.2; EXPRESSED IN HELA, SIGNAL = 0.55; SWISSPROT HIT: Q9UH17, EVALUE 4.00e-18
ALEQTNTQTEQGDGGKELQWQDLLDSCPGPSSPCPTPALLLLPLSELALTLLLSQVYSELKYHPEMRFFHWFSKWRKLHRDQEYEVTWYISWSPCTKCTRDMATFLAEDPKVTLTIFVARLYYFWDPDYQEALRSLCQKRDGPRATMKIMN

SEQ ID NO: 34156 - protein, 154 aa, Homo sapiens
  MAP TO AL022328.21; EXPRESSED IN HELA, SIGNAL =   1; SWISSPROT HIT: Q61245, EVALUE 2.40e-01
LYACSQSAQWPWFLLCSSAALSCSSRDCCSTRSSSLAMPARVPISANSCGFDCASISIMDSCLWRGQGVWEVAPDRVPALQAAAPPAPARSHGSPRVQGPKQPGPRGPWNPTGRDGPQWAHTRHAHARPRPFVGRGAGPLCCPAFCWRVSTSRV

SEQ ID NO: 34157 - protein, 116 aa, Homo sapiens
  MAP TO AB016897.1; EXPRESSED IN HELA, SIGNAL =   1; SWISSPROT HIT: P55597, EVALUE 6.20e+00
LSGYGLDTGRPSRQLPPWLALTSCSTRRGCTALPGLWAPRALLFPPFLSATANSKQGREQLGSSWESCGLLHPVAGGLHPAAPPAPAHLQLPRPQRHGRTQRRPPRQLPGDSSQVS

SEQ ID NO: 34158 - protein, 195 aa, Homo sapiens
  MAP TO AL022326.1; EXPRESSED IN HELA, SIGNAL = 0.53; SWISSPROT HIT: P49882, EVALUE 9.50e+00
AGAGGHCGSVALRLVALGLGVEGVGRLLVGAAHTGGIRPSGLHVGRVRHAGVLAGVHVVLGEEGRVGANLVPLEGQHSLARLGTKAGEDKDRREGVVRGETDKSTGLVVVSSQDTGRRGLKILKAPNMRPSLAVEKEGCSRSHPRKCPEPYHPARKYPRNHLPLSPNPRGQSGLPKVLDLHYGVLRWLKGSQQPS

SEQ ID NO: 34159 - protein, 60 aa, Homo sapiens
  MAP TO AL022718.1; EXPRESSED IN HELA, SIGNAL = 0.59
CSRRSCCSWDVRAQEVAWRSSACLCSRRTWCSSSSRCLVATRTLKAKALQVQALLMARGT

SEQ ID NO: 34160 - protein, 42 aa, Homo sapiens
  MAP TO AL034406.1; EXPRESSED IN HELA, SIGNAL = 0.76
RNNFTKQLTELSEVKSEFSSFIKYKSFGKCVFVIMVNLHIPH

SEQ ID NO: 34161 - protein, 77 aa, Homo sapiens
  MAP TO AL022327.17; EXPRESSED IN HELA, SIGNAL = 0.56; SWISSPROT HIT: P49715, EVALUE 6.40e-01
ALELGEGLAAAGYREVKTDAVPSPPPKPDSVQCSSPGDHQETPHLLIFICKDNVCEHFLKPKDPRAPPRRSRIYTAG

SEQ ID NO: 34162 - protein, 90 aa, Homo sapiens
  MAP TO AP000345.1; EXPRESSED IN HELA, SIGNAL = 0.9; SWISSPROT HIT: P10040, EVALUE 6.70e+00
PYPSCKALTWRRSISSKQSISCHQARPRYWGLIASILQPTLRSTHRVTGAALGNEDKKMNRPRHVRLRSHRLRQETGSIPHTKVWMHTGH

SEQ ID NO: 34163 - protein, 28 aa, Homo sapiens
  MAP TO AP000359.1; EXPRESSED IN HELA, SIGNAL = 0.54
LLLVMYEHQTSLGSLVGASTEKSQHCRW

SEQ ID NO: 34164 - protein, 79 aa, Homo sapiens
  MAP TO AC007092.4; EXPRESSED IN HELA, SIGNAL = 0.48
KRQLMSPEAEARKPNYTTFHSSVRIGIIVPNSKGPCVKGRCHIILFWPNVFINLGLEQSPALLSFKVLASLILFLSSCC

SEQ ID NO: 34165 - protein, 183 aa, Homo sapiens
  MAP TO AL022328.21; EXPRESSED IN HELA, SIGNAL = 0.58; SWISSPROT HIT: Q9WVL2, EVALUE 3.00e-06
LLLHRAPLRERPAAPSLLLHRAPLRERPAAPSLLLHRAPLRERPAAPSLLLHRAPLRERPAAPSLLLHRAPLRERPAAPSLLLHRAPLRERPAAPSLLLHRAPLRERPAAPSLLLHRAPLRERPAAPSLLLHRVPLRERPALAGHLLPLPEHQLQGAGSMQCPLCPQRALCTPVRTGSSALDL

SEQ ID NO: 34166 - protein, 102 aa, Homo sapiens
  MAP TO AB016897.1; EXPRESSED IN HELA, SIGNAL = 0.99; SWISSPROT HIT: P27099, EVALUE 5.80e+00
EGSSRGARGDQAGRKQEAGIEVSPGPTPRVRYGKRRVLLEEAVIQWGQWASEVRGTASHRAGGGGSPPADSAAPELPAELRDRGRHGRLHLATASPLVCSAI

SEQ ID NO: 34167 - protein, 34 aa, Homo sapiens
  MAP TO AC008009.4; EXPRESSED IN HELA, SIGNAL = 0.3
PKIEFTLKTLIMNCIHQGSQLTQEEYLWLLQGNF

SEQ ID NO: 34168 - protein, 151 aa, Homo sapiens
  MAP TO AP000477.2; EXPRESSED IN HELA, SIGNAL = 0.57; SWISSPROT HIT: P36574, EVALUE 3.60e-01
VFYFLFVVIVNAIAFLISFSDYLLLAYRNASNFCTLILYPATILNLFISSNCFLVESFSFPKCKNISSANKDNLTAFIPIWMTFISFSCLIALARTSSTMLNTSGKSGHPYIVPVLRDKALSFSSFNMILAVGLSYMAFLVLRYIPSILSF

SEQ ID NO: 34169 - protein, 46 aa, Homo sapiens
  MAP TO AP000356.1; EXPRESSED IN HELA, SIGNAL = 0.54
GVRKTPLPQWISKCGRLNMSRFSPITLSRLVLKFPGRGRVAWGVTS

SEQ ID NO: 34170 - protein, 32 aa, Homo sapiens
  MAP TO AP000344.1; EXPRESSED IN HELA, SIGNAL = 0.5
THTHTHVPVNHPACCPSQLTFATRETALALGL

SEQ ID NO: 34171 - protein, 113 aa, Homo sapiens
  MAP TO AC007934.7; EXPRESSED IN LUNG, SIGNAL = 0.64; SWISSPROT HIT: Q08426, EVALUE 5.00e-60
QPLESRRLCNKPIQSLPNMDSIFSEALLKMRRQHPGCLAQEACVRAVQAAVQYPYEVGIKKEEELFLYLLQSGQARALQYAFFAERKANKWSTPSGASWKTASARPVSSVGVV

SEQ ID NO: 34172 - protein, 58 aa, Homo sapiens
  MAP TO AJ009613.3; EXPRESSED IN LUNG, SIGNAL = 0.87; EXPRESSED IN PLACENTA, SIGNAL = 1.5; SWISSPROT HIT: Q04279, EVALUE 2.10e+00
PLSNAYHELAQVYSTNNPSELRNLVNKHSETFTRDNNMGLVKQCLSSLYKKNIQRLTK

SEQ ID NO: 34173 - protein, 77 aa, Homo sapiens
  MAP TO AC007075.3; EXPRESSED IN LUNG, SIGNAL = 0.45; EXPRESSED IN PLACENTA, SIGNAL = 0.84; EXPRESSED IN HEART, SIGNAL = 0.97; SWISSPROT HIT: P43212, EVALUE 1.70e-01
MIQFFPNCILSISIKICYNFPRKRQKKESALTPYPLQVTTHSFGLYGKAHKSCVLMGFTFCFETHSCFHCSMKCHGQ

SEQ ID NO: 34174 - protein, 47 aa, Homo sapiens
  MAP TO AC005263.1; EXPRESSED IN LUNG, SIGNAL = 0.45; SWISSPROT HIT: Q62203, EVALUE 1.00e-22
IDYPEIAEGIMPRHRFMSAYEQRIEPPDRRWQYLLMAAEPYETIAFK

SEQ ID NO: 34175 - protein, 47 aa, Homo sapiens
  MAP TO AC005263.1; EXPRESSED IN LUNG, SIGNAL = 0.45; SWISSPROT HIT: P10158, EVALUE 1.70e+00
LTTLRSPRASCHVTASCLRTSRGSSLRTGAGSTCSWPPSPTRPLPSR

SEQ ID NO: 34176 - protein, 45 aa, Homo sapiens
  MAP TO AC010504.6; EXPRESSED IN LUNG, SIGNAL = 1.3; SWISSPROT HIT: O15063, EVALUE 4.00e-04
DGLHGGWSGAQGDSASSSDETSSANGDSLFSMFSGPDLVAAVKQR

SEQ ID NO: 34177 - protein, 45 aa, Homo sapiens
  MAP TO AC010504.6; EXPRESSED IN LUNG, SIGNAL = 1.3; SWISSPROT HIT: P04010, EVALUE 8.30e+00
MACTVAGRVLRETLPARVMRHPQPTGTACSPCFQGLTSLLLSSRE

SEQ ID NO: 34178 - protein, 31 aa, Homo sapiens
  MAP TO AC004192.1; EXPRESSED IN PLACENTA, SIGNAL = 2.7; EXPRESSED IN LUNG, SIGNAL =   3; SWISSPROT HIT: P15208, EVALUE 1.70e+00
AKRKEGQGEEGGSSPCCREEAGGQESGKSLV

SEQ ID NO: 34179 - protein, 73 aa, Homo sapiens
  MAP TO AC009123.6; EXPRESSED IN LUNG, SIGNAL = 1.3; SWISSPROT HIT: P45969, EVALUE 2.00e-09
FDRIENLEEYTGLRCLWLQSNGIQKIENLEAQTELRCLFLQMNLLRKIENLEPLQKLDALNLSNNYIKTIENL

SEQ ID NO: 34180 - protein, 42 aa, Homo sapiens
  MAP TO AC009123.6; EXPRESSED IN LUNG, SIGNAL = 1.3
VLIALRTWKSTQGCAVSGCRAMEYRKSKTWRPKLSCVASSCK

SEQ ID NO: 34181 - protein, 31 aa, Homo sapiens
  MAP TO AC004785.1; EXPRESSED IN PLACENTA, SIGNAL =  10; EXPRESSED IN LUNG, SIGNAL = 0.7
AGLPEMQKTCQGYCYQSNQGHYSNHNASNGP

SEQ ID NO: 34182 - protein, 24 aa, Homo sapiens
  MAP TO AC013559.2; EXPRESSED IN LUNG, SIGNAL = 0.41
DTENEIQAEVVSDGEEELVGNWNK

SEQ ID NO: 34183 - protein, 32 aa, Homo sapiens
  MAP TO AC013559.2; EXPRESSED IN LUNG, SIGNAL = 0.41
VEATLELGNRQRLEQFGGHKRRQENVGKFGTS

SEQ ID NO: 34184 - protein, 65 aa, Homo sapiens
  MAP TO AC008982.4; EXPRESSED IN PLACENTA, SIGNAL = 2.3; EXPRESSED IN LUNG, SIGNAL = 2.1; SWISSPROT HIT: Q13011, EVALUE 4.00e-31
LTGSNYPGLSISLRLTGSSAQEEASGVALGEAPDHSYESLRVTSAQKHVLHVQLNRPNKRNAMNK

SEQ ID NO: 34185 - protein, 180 aa, Homo sapiens
  MAP TO AC009489.3; EXPRESSED IN LUNG, SIGNAL = 2.9; EXPRESSED IN PLACENTA, SIGNAL = 3.4; EXPRESSED IN HEART, SIGNAL = 2.8; SWISSPROT HIT: P03355, EVALUE 3.00e-13
SVSLDPITVVGVDNQASKPLKTPQLLCRLRQHSSMHSFLVIPTCPVPLLGQDILTKLSASLIIPGLQPHLIATLLAKPKPPSCLPLVPPDLNLQVWDTSTPSLATNHRPITIPLKPNHPYPAQCQDPITQQVLRGLKAVVSCLLQHGLLKPKKSPCNSSIFPIQKLDKSYRLFQDLCLII

SEQ ID NO: 34186 - protein, 75 aa, Homo sapiens
  MAP TO AC008620.5; EXPRESSED IN LUNG, SIGNAL = 0.59; SWISSPROT HIT: Q9QXZ0, EVALUE 9.90e+00
MAAEQEKVGAEFQALRAFLVEQEGRLLGRLEELSREVAQKQNENLAQLGAEITQLSKLSSQIQETAQKPDLDFLQ

SEQ ID NO: 34187 - protein, 43 aa, Homo sapiens
  MAP TO AC008620.5; EXPRESSED IN LUNG, SIGNAL = 0.59
TDGSGAGEGGGRVPGTEGFPGGAGGSAARPPGGTVPGGGTEAE

SEQ ID NO: 34188 - protein, 75 aa, Homo sapiens
  MAP TO AL121928.13; EXPRESSED IN LUNG, SIGNAL = 2.1; EXPRESSED IN PLACENTA, SIGNAL = 1.4; SWISSPROT HIT: Q92538, EVALUE 1.00e-36
VLLSLRILLLMKPSVLSRVSHQVAYGLHELLKTNAANIHSGDDWATLFTLLECIGSGVKPPAALQATARADAPDA

SEQ ID NO: 34189 - protein, 50 aa, Homo sapiens
  MAP TO AC002380.1; EXPRESSED IN LUNG, SIGNAL = 0.42; SWISSPROT HIT: P34433, EVALUE 9.70e-01
MTGILIRRGDEDRDMHRKKPHEDREKTVIYRPRRESTEKTDPADTLILGF

SEQ ID NO: 34190 - protein, 64 aa, Homo sapiens
  MAP TO AL031660.16; EXPRESSED IN LUNG, SIGNAL = 0.65; SWISSPROT HIT: O05069, EVALUE 8.40e-02
GGFLGLDSGPWCPIQQPTEGNKEPSDGLKNRRIPKEPAGIHEEARRDNWRQQQKLGGSRPVREQ

SEQ ID NO: 34191 - protein, 24 aa, Homo sapiens
  MAP TO AL031660.16; EXPRESSED IN LUNG, SIGNAL = 0.65
RLPWFRFWPLVPHPAANRGKQGAL

SEQ ID NO: 34192 - protein, 53 aa, Homo sapiens
  MAP TO AC040171.3; EXPRESSED IN HEART, SIGNAL = 3.2; EXPRESSED IN LUNG, SIGNAL = 1.4; SWISSPROT HIT: P23389, EVALUE 1.60e+00
CQTSQRILHQNRENEQTFIAMAHLYKKKGRDVLGSEEPQTEGPAEAMAEEHKL

SEQ ID NO: 34193 - protein, 54 aa, Homo sapiens
  MAP TO AC040171.3; EXPRESSED IN HEART, SIGNAL = 3.2; EXPRESSED IN LUNG, SIGNAL = 1.4; SWISSPROT HIT: O75643, EVALUE 8.10e+00
CARPVKESCIKIERTNKPSSPWHIYIKKKGEMFWEVRNPKQRDRLKPWQKNINC

SEQ ID NO: 34194 - protein, 41 aa, Homo sapiens
  MAP TO AC013559.2; EXPRESSED IN LUNG, SIGNAL = 0.74; SWISSPROT HIT: P52374, EVALUE 2.90e+00
YIQELTTDGLLSLWPATGCHQYHVLWNLHSRHRWRLYRRTI

SEQ ID NO: 34195 - protein, 26 aa, Homo sapiens
  MAP TO AC010629.5; EXPRESSED IN LUNG, SIGNAL = 0.67
IEQALLVEQCNLHDCRPEEKVMPEGE

SEQ ID NO: 34196 - protein, 46 aa, Homo sapiens
  MAP TO AC026730.3; EXPRESSED IN LUNG, SIGNAL = 0.5
VYRYWFMAGKDSYIRGQSKRFIDLEEVQHLDTLAFHDGGQAGKEKK

SEQ ID NO: 34197 - protein, 28 aa, Homo sapiens
  MAP TO AL021306.1; EXPRESSED IN LUNG, SIGNAL = 0.86; EXPRESSED IN PLACENTA, SIGNAL = 1.1
CEVTHQRSHSLKRQSCHLTLGLSTSRCT

SEQ ID NO: 34198 - protein, 17 aa, Homo sapiens
  MAP TO AC008600.4; EXPRESSED IN LUNG, SIGNAL = 0.64
CRLGISTKPPLIPRTPS

SEQ ID NO: 34199 - protein, 98 aa, Homo sapiens
  MAP TO AC005199.1; EXPRESSED IN LUNG, SIGNAL = 1.5
CFVIVVGVGNGGGGGSGDGVKCGFGGCGGSGGGGGGGEDGVEGHGGGGGVGGSGDGVEGGSVGDGAEGGSGGDGAECCGSGGGGGTGTDNGDGVIMRW

SEQ ID NO: 34200 - protein, 107 aa, Homo sapiens
  MAP TO AL031283.26; EXPRESSED IN PLACENTA, SIGNAL = 0.45; EXPRESSED IN LUNG, SIGNAL = 0.51; SWISSPROT HIT: P53865, EVALUE 5.50e+00
LIEKITQVTEDNINFQQKKWTLQKETQLSNSKQEETTENIEKLRTSLDSCQVAPPYAFHKWSLCLIFVRLIWEIAQLFWSKLGRNAWLFYPLFPLVGETCWRRKNKG

SEQ ID NO: 34201 - protein, 30 aa, Homo sapiens
  MAP TO AC020588.4; EXPRESSED IN LUNG, SIGNAL = 0.47; SWISSPROT HIT: P18191, EVALUE 2.30e+00
TDLHTKCVVDVDANKVILNPVNTNLSKGDA

SEQ ID NO: 34202 - protein, 21 aa, Homo sapiens
  MAP TO AC020588.4; EXPRESSED IN LUNG, SIGNAL = 0.47
RLTCIPNVWWMWMQTRLFLIL

SEQ ID NO: 34203 - protein, 277 aa, Homo sapiens
  MAP TO AF025422.1; EXPRESSED IN LUNG, SIGNAL = 0.98; SWISSPROT HIT: P04052, EVALUE 3.00e-06
MSAPKNSRVLSGSSYEPSPSPDSPRSMLASPSFSLSPLRNSDLRGSSSPGIRSYNSPPSRASPHSPLSSPESHKLPFPFPHRDGQSMKPLGSPASSSGDSLESPRSSIIYHMFLLPSPSSSPAALGESPVSPSYSPNNPRFQLESAPHTQESPTNSRASRCSSPVSFISSPPGLRDSPVSPSYSPTIPRFLRESAPCTQESPRNSQVSGDYERSPSPDSSRFMPASPSFFSLSPPRNSDPRGSSSPGMWKYSTSCRRASPLSHPPSTEFHNFTFPFP

SEQ ID NO: 34204 - protein, 186 aa, Homo sapiens
  MAP TO AL080317.11; EXPRESSED IN LUNG, SIGNAL = 0.95; SWISSPROT HIT: P96372, EVALUE 1.30e+00
MATTFPSGVSWIEQYTTIHGKSAAFFVIGASLGEMAIPAVIGILQGKYPDLPVVLYTSLGASIATGILFPVLYKLATSPLDRQRKEDRKSEDQKALLSSSGLNEYEEENEEEDAEKWNEMDFEMIETNDTMRHSIIETSRSSLTEPTAEVYNQYPSNALVFESSPFNTGSAHVKHLPETRTKGTNV

SEQ ID NO: 34205 - protein, 164 aa, Homo sapiens
  MAP TO AC008616.2; EXPRESSED IN LUNG, SIGNAL =   1; EXPRESSED IN PLACENTA, SIGNAL = 2.2; SWISSPROT HIT: P04258, EVALUE 9.40e-01
MAPGQKSRPPGSRASLFPPHPAPGLRSRLHHCSAPCGHFPSPDLSVLTCEMDTALGMGRGFPEQDGNVGVGVPPVARSGPRGQTGFAPWCDPHALSPAAPRPPGAGEPDQGLQAGDGGAGEPPGAERPEPAAGARGLRGYAEAAPPVGGGAAEAAAGGGRAGDR

SEQ ID NO: 34206 - protein, 21 aa, Homo sapiens
  MAP TO AC008616.2; EXPRESSED IN LUNG, SIGNAL =   1; EXPRESSED IN PLACENTA, SIGNAL = 2.2
CWRTGPRTPSWRWRCWRTSRS

SEQ ID NO: 34207 - protein, 479 aa, Homo sapiens
  MAP TO AC005530.1; EXPRESSED IN LUNG, SIGNAL = 1.8; SWISSPROT HIT: P15648, EVALUE 5.80e+00
EEDFPRHQGPTRLCLTHCSRCTMGSCVHSSQSCCSRACRGHTGPRVGGCVGPTGGCAGLRIGDCADPTGHCARLRVGGCAGLTGGCAGVRVGGCASPTGGCAGLRVGGCADPTGGCAGLRVGGSAGPTGHCAGLRVGGCVGPTGGRTGLRVGGCVGPTGGCAGLRIGDCADPTGHCAGLRVGGCAGPTGGCAGVRVGGCASPTGGRAGLRVGGCAGPTGGRAGLRVGGCAGPTGGCAGVRVGGCASPTGGRAGLRVGGSAGPTGHCAGVRVGGCAGPTGGRAGLRVGGCASPIGGRSGLRVGGCAGPTGGCAGLRVGGSAGPTGHCAGLRVGGCAGPTGGCAGLRVGGCASPTGGCAGVRVGGCAGPTGECARLRVGGSAGPTGHCAGLRVGGSAGSTGGHTGPRVGDCAGPTGGCAGLRVGGCAGPTGGCAGLRVGGYADPTGRCAELRVGGCADPTGGCMELRVGDYADPIGGHAGP

SEQ ID NO: 34208 - protein, 29 aa, Homo sapiens
  MAP TO AC016606.6; EXPRESSED IN PLACENTA, SIGNAL = 0.75; EXPRESSED IN HEART, SIGNAL = 0.99
EGPNSLINEEEFFDAVEAALDRQDKIEEQ

SEQ ID NO: 34209 - protein, 38 aa, Homo sapiens
  MAP TO AC004091.1; EXPRESSED IN PLACENTA, SIGNAL = 0.75; SWISSPROT HIT: P30620, EVALUE 8.50e+00
LHSFRRKKKLTEQKVKVVIMVGFNTYCLSQDMLKNEKK

SEQ ID NO: 34210 - protein, 32 aa, Homo sapiens
  MAP TO AC002471.5; EXPRESSED IN PLACENTA, SIGNAL =   1; SWISSPROT HIT: P30098, EVALUE 5.10e+00
WCAPGSTGLRTMSGRASPACSRARWPGWTPSA

SEQ ID NO: 34211 - protein, 48 aa, Homo sapiens
  MAP TO AC002471.5; EXPRESSED IN PLACENTA, SIGNAL =   1
VCTRKHRLEDDERQSIPSMLQGEVARLDPKCMINLDSSRCSNNGTVHL

SEQ ID NO: 34212 - protein, 19 aa, Homo sapiens
  MAP TO AC005173.1; EXPRESSED IN PLACENTA, SIGNAL = 0.58
TLVTQQRAKPVSAVMEPTF

SEQ ID NO: 34213 - protein, 35 aa, Homo sapiens
  MAP TO AC004182.1; EXPRESSED IN PLACENTA, SIGNAL =  14; EXPRESSED IN HEART, SIGNAL =  33; SWISSPROT HIT: Q04222, EVALUE 8.60e+00
GLTSSRGCTAATWGRTGASSAGMTRTPTTARITSP

SEQ ID NO: 34214 - protein, 22 aa, Homo sapiens
  MAP TO AC004182.1; EXPRESSED IN PLACENTA, SIGNAL =  14; EXPRESSED IN HEART, SIGNAL =  33
VSHHPEDVRLRRGAGRAPPPRV

SEQ ID NO: 34215 - protein, 25 aa, Homo sapiens
  MAP TO AL118558.2; EXPRESSED IN PLACENTA, SIGNAL = 2.6; EXPRESSED IN HEART, SIGNAL =   3
SSLTVKILGREIFLKPPFTESMGNS

SEQ ID NO: 34216 - protein, 43 aa, Homo sapiens
  MAP TO AL118558.2; EXPRESSED IN PLACENTA, SIGNAL = 2.6; EXPRESSED IN HEART, SIGNAL =   3; SWISSPROT HIT: Q28651, EVALUE 4.00e-19
LLELFDSEDPRERDFLKTTLHRIYGKFLGLRAYIRKQINNIFY

SEQ ID NO: 34217 - protein, 89 aa, Homo sapiens
  MAP TO AC008762.5; EXPRESSED IN PLACENTA, SIGNAL = 0.62; SWISSPROT HIT: P36715, EVALUE 3.80e+00
SALSSASRQEATTRPSAQVPWAEGVGRRGASSRNPQRSTTCSRAHNSLVGGIRKEKDPQPQQLPPMDPKLLKQLRKAEKAEREFRKKFK

SEQ ID NO: 34218 - protein, 71 aa, Homo sapiens
  MAP TO AC018762.4; EXPRESSED IN PLACENTA, SIGNAL = 1.3
CEGRICEMLIFIISQWLIEKLEENGTAGMEKQFMTDEKEEEEEKKKKKEKEEEEEGEEEEVWGGKKEPPPQ

SEQ ID NO: 34219 - protein, 30 aa, Homo sapiens
  MAP TO AC004195.1; EXPRESSED IN PLACENTA, SIGNAL = 0.69
KNNSEDIPYWEWARSAGFHAKERRVLLWLQ

SEQ ID NO: 34220 - protein, 87 aa, Homo sapiens
  MAP TO AC013602.2; EXPRESSED IN PLACENTA, SIGNAL = 0.57; SWISSPROT HIT: P57071, EVALUE 2.70e-01
CESCQEYFVDECPNHGPPVFVSDTPVPVGIPDRAALTIPQGMEVVKDTSGESDVRCVNEVIPKGHIFGPYEGQISTQDKSAGFFSWL

SEQ ID NO: 34221 - protein, 57 aa, Homo sapiens
  MAP TO AC013602.2; EXPRESSED IN PLACENTA, SIGNAL = 0.57; SWISSPROT HIT: P03220, EVALUE 3.60e+00
SVSPARSTSWMNAQTMAPRCLCLTHRCPWASQTGRRSPSHRAWRWSRTLVERVTCDV

SEQ ID NO: 34222 - protein, 47 aa, Homo sapiens
  MAP TO AC002455.1; EXPRESSED IN HEART, SIGNAL =   1; EXPRESSED IN PLACENTA, SIGNAL = 1.2
GTPSACLNYITSYVSCSGRRRSTSARSCRSTPIAARRSKRPCTPAPL

SEQ ID NO: 34223 - protein, 21 aa, Homo sapiens
  MAP TO AC026888.4; EXPRESSED IN PLACENTA, SIGNAL =   3; EXPRESSED IN HEART, SIGNAL =   2
LFGLKSSSRSLSFILRVMGNN

SEQ ID NO: 34224 - protein, 23 aa, Homo sapiens
  MAP TO AC003073.2; EXPRESSED IN PLACENTA, SIGNAL = 0.53
CSSCLQFCLEMKLRGPPSTRVSA

SEQ ID NO: 34225 - protein, 19 aa, Homo sapiens
  MAP TO AL021182.1; EXPRESSED IN PLACENTA, SIGNAL = 1.1
GSERLGWRRCSSLSKILTW

SEQ ID NO: 34226 - protein, 39 aa, Homo sapiens
  MAP TO AC008507.6; EXPRESSED IN PLACENTA, SIGNAL = 1.6
APYYQLWSTPPSSSMSPGAASPSSCLQTSFQRQQKMFVL

SEQ ID NO: 34227 - protein, 43 aa, Homo sapiens
  MAP TO AL109800.25; EXPRESSED IN PLACENTA, SIGNAL = 0.85
AQAQGDQSSVPEPWLKFEFLQGGPAAAVLAAASPPRSSDGLDC

SEQ ID NO: 34228 - protein, 24 aa, Homo sapiens
  MAP TO AC009320.7; EXPRESSED IN PLACENTA, SIGNAL = 0.82; SWISSPROT HIT: P33292, EVALUE 5.20e+00
MYYQRALQLHPQHNRALFNLGNLL

SEQ ID NO: 34229 - protein, 26 aa, Homo sapiens
  MAP TO AC010749.3; EXPRESSED IN PLACENTA, SIGNAL = 0.88
WQQAFCSLIWGSWPHGFQGMEPWAMR

SEQ ID NO: 34230 - protein, 42 aa, Homo sapiens
  MAP TO AC016602.5; EXPRESSED IN PLACENTA, SIGNAL = 0.42; SWISSPROT HIT: O57863, EVALUE 6.40e+00
YKGSSEEAKEFPEYEDIFPYSSENVFVLPLVLDDCLVGYTIP

SEQ ID NO: 34231 - protein, 60 aa, Homo sapiens
  MAP TO AC016602.5; EXPRESSED IN PLACENTA, SIGNAL = 0.42
IILKMLPVASNVSTVLPIIFITVEICVIETGIKDPLKKLRSSQSMRISSHILLKTSLFCP

SEQ ID NO: 34232 - protein, 44 aa, Homo sapiens
  MAP TO AC011525.4; EXPRESSED IN PLACENTA, SIGNAL = 0.91; EXPRESSED IN HEART, SIGNAL = 1.1
GRSILWPRQVTTCAIGITGHPLTGARGAQEHLCVSRQKAPTAKR

SEQ ID NO: 34233 - protein, 25 aa, Homo sapiens
  MAP TO AC000074.2; EXPRESSED IN PLACENTA, SIGNAL = 2.5; EXPRESSED IN HEART, SIGNAL = 1.8
CRRPRLCCWQLCCWAWCCWWCCCCF

SEQ ID NO: 34234 - protein, 96 aa, Homo sapiens
  MAP TO AC000074.2; EXPRESSED IN PLACENTA, SIGNAL = 2.5; EXPRESSED IN HEART, SIGNAL = 1.8; SWISSPROT HIT: P21964, EVALUE 2.00e-40
MPEAPPLLLAAVLLGLVLLVVLLLLLRHWGWGLCLIGWNEFILQPIHNLLMGDTKEQRILNHVLQHAEPGNAQSVLEAIDTYCEQKEWAMNVGDKK

SEQ ID NO: 34235 - protein, 40 aa, Homo sapiens
  MAP TO AC016602.5; EXPRESSED IN PLACENTA, SIGNAL = 0.66
DCKPLLRPVSIQGGFCSPQFRLLTGVQGVRKGWTEDRGRM

SEQ ID NO: 34236 - protein, 44 aa, Homo sapiens
  MAP TO AC010522.3; EXPRESSED IN PLACENTA, SIGNAL = 0.69; SWISSPROT HIT: Q11130, EVALUE 1.30e+00
SVTAPSVTHPWARIGTVMPISPGWSPSPPNPALNHVVRWRWWPR

SEQ ID NO: 34237 - protein, 57 aa, Homo sapiens
  MAP TO AC004181.1; EXPRESSED IN PLACENTA, SIGNAL = 0.72; SWISSPROT HIT: O95670, EVALUE 3.00e-26
AMGSQGNLSAEVEQATRRQVQGMQSSQQRNRERVLAQLLGMVCDVRPQVHPNYRISA

SEQ ID NO: 34238 - protein, 47 aa, Homo sapiens
  MAP TO AC004181.1; EXPRESSED IN PLACENTA, SIGNAL = 0.72
PWAPRGTCLLRWSRLQGARCRACRAPSRETESVSWPSFLAWSATSGP

SEQ ID NO: 34239 - protein, 54 aa, Homo sapiens
  MAP TO AC004511.1; EXPRESSED IN PLACENTA, SIGNAL = 0.47; SWISSPROT HIT: Q28809, EVALUE 9.00e-15
MSRLPVLLLLQLLVRPGLQAPMTQTTSLKTSWVNCSNMIDEIITHLKQPPLPLL

SEQ ID NO: 34240 - protein, 56 aa, Homo sapiens
  MAP TO AC000357.1; EXPRESSED IN PLACENTA, SIGNAL = 0.39
PNEEFGILFANRSFLVLRGRYGYVGSSSGHDLIQCNQDQPDRIHLLPCRPGIYHFQ

SEQ ID NO: 34241 - protein, 57 aa, Homo sapiens
  MAP TO AC000357.1; EXPRESSED IN PLACENTA, SIGNAL = 0.39
AQMRNLGFYLPIAPSLYCEVVMAMWAPHRAMTSYSATRISPTAFIYYPADRVSTTSR

SEQ ID NO: 34242 - protein, 64 aa, Homo sapiens
  MAP TO AC004779.1; EXPRESSED IN PLACENTA, SIGNAL = 0.45
LSPLPQKLVCRCEQFHLQRSLHFSSSLAVVASENQFLMNESKLNYIAAFRFALDTAVQLVEIVL

SEQ ID NO: 34243 - protein, 30 aa, Homo sapiens
  MAP TO AC004779.1; EXPRESSED IN PLACENTA, SIGNAL = 0.45
SSLLCRKNLCAAANNSISSAACISPVVLQW

SEQ ID NO: 34244 - protein, 53 aa, Homo sapiens
  MAP TO CHR22_192.0; EXPRESSED IN PLACENTA, SIGNAL = 0.32
QPEGVVQPAPGFWCSSSRWRKFQAPGSSGVCHPAALQACPAESSLDPARTGQN

SEQ ID NO: 34245 - protein, 59 aa, Homo sapiens
  MAP TO CHR22_192.0; EXPRESSED IN PLACENTA, SIGNAL = 0.32; SWISSPROT HIT: P14652, EVALUE 3.60e+00
SQKGLSSQHLGFGAPQAGGGSFRHLAPQVSAIQLLFRPAQQRALLIQLELARTDSLRNV

SEQ ID NO: 34246 - protein, 69 aa, Homo sapiens
  MAP TO AL137798.1; EXPRESSED IN PLACENTA, SIGNAL = 0.87; SWISSPROT HIT: P42363, EVALUE 2.00e+00
PGPTSSATNVSMVVSAGPLSSEKAEMNILEINEKLHPQLAEKKQQFRNLKEKCFVTQLACFLANQQNKY

SEQ ID NO: 34247 - protein, 26 aa, Homo sapiens
  MAP TO AL137798.1; EXPRESSED IN PLACENTA, SIGNAL = 0.87
SLAPPLLPQTSAWWYQPALCPARRQR

SEQ ID NO: 34248 - protein, 27 aa, Homo sapiens
  MAP TO AC017082.3; EXPRESSED IN PLACENTA, SIGNAL = 0.44; SWISSPROT HIT: Q64666, EVALUE 5.10e+00
SAILAKSAMMPVLHKFPFQMMSPCPWF

SEQ ID NO: 34249 - protein, 88 aa, Homo sapiens
  MAP TO AC025179.2; EXPRESSED IN PLACENTA, SIGNAL = 0.41; SWISSPROT HIT: P21402, EVALUE 5.70e+00
GMKSQLKPKTTNLLSGEITHTTTMKMWKQVLPKLKEKPIRNYMKTQGSLISRSISMEMRHLLTIITSRSLVLLKFLKMKIYTFFQIHI

SEQ ID NO: 34250 - protein, 27 aa, Homo sapiens
  MAP TO AC015833.3; EXPRESSED IN PLACENTA, SIGNAL = 0.35
MEKGQYDVWQGEVEAGKNNILEEEPII

SEQ ID NO: 34251 - protein, 25 aa, Homo sapiens
  MAP TO AC015833.3; EXPRESSED IN PLACENTA, SIGNAL = 0.35
WRKDSTMCGKERWKQEKIIYWRKNL

SEQ ID NO: 34252 - protein, 55 aa, Homo sapiens
  MAP TO AL137178.3; EXPRESSED IN PLACENTA, SIGNAL = 0.51
INICVTSVFLVITYMPVFIILQDKEFCHKPSHIISRFRSPEVFQGKNLGEESLGG

SEQ ID NO: 34253 - protein, 61 aa, Homo sapiens
  MAP TO CHR22_89.0; EXPRESSED IN PLACENTA, SIGNAL = 0.31; SWISSPROT HIT: Q29092, EVALUE 6.50e-02
FILQQQEEERIKAEELYEKDTEELKIMEEQYRTQTEVKKQSKLTLKSLEVELKTVRSNSNQ

SEQ ID NO: 34254 - protein, 190 aa, Homo sapiens
  MAP TO AC005324.1; EXPRESSED IN PLACENTA, SIGNAL = 1.6; SWISSPROT HIT: Q16763, EVALUE 1.00e-104
MNSNVEKLPPHIIRLVYKEVTTLTADPPDGIKVFPNEEDLTDLQVTIEGPEGTPYAGGLFRMKLLLGKDFPASPPKGYFLTKIFHPNVGANGEICVNVLKRDWTAELGIRHVLLTIRCLLIHPNPESALNEEAGRLLLENSEEYAARARLLTEIHGGAGGPSGRAEAGRALASGTAASSTDPGAPGGLGG

SEQ ID NO: 34255 - protein, 345 aa, Homo sapiens
  MAP TO AC005630.1; EXPRESSED IN PLACENTA, SIGNAL = 2.4; SWISSPROT HIT: Q08379, EVALUE 7.00e-10
EPLAPEPPAGPSKVEQLQDETNHLRKELESVGRQLQAEVENNQMLSLLNRRQEERLREQEERLHEQEERQREQEDRLHEQEERLREHEERLCEQEERLCEQEERLREQEERLHEQEERLREQEERLCEQEERLREHEERLCEQEERLREQEERLCEQEERLREQEERLCEQEERLREQEERLCEQEKLPGQERLLEEVEKLLEQERRQEEQERLLERERLLEEVEKLLEQERQQEEQERLLERERLLEEVEKLLEQERRQEEQERLLERERLLDEVEELLDEVEELLEQERLRQQDERLWQQETLQELERLRELERLRELERMLELGWEALYEQRAEPRSGFEEL

SEQ ID NO: 34256 - protein, 223 aa, Homo sapiens
  MAP TO AC011446.2; EXPRESSED IN PLACENTA, SIGNAL = 1.4; SWISSPROT HIT: P17950, EVALUE 2.00e-52
MEVQKEAQRIMTLSVWKMYHSRMQRGGLRLHRSLQLSLVMRSARELYLSAKVEALEPEVSLPAALPSDPRLHPPREAESTAETATPDGEHPFPEPMDTQEAPTAEETSACCAPRPAKVSRKRRSSSLSDGGDAGLVPSKKARLEEKEEEEGASSEVADRLQPPPAQAEGAFPNLARVLQRRFSGLLNCSPAAPPTAPPACEAKPACRPADSMLNVLVRAVVAF

SEQ ID NO: 34257 - protein, 114 aa, Homo sapiens
  MAP TO AC011446.2; EXPRESSED IN PLACENTA, SIGNAL = 1.4; SWISSPROT HIT: P80249, EVALUE 3.50e-01
CRCGRCITPACSAVACGCTGVCSCRWSCAAPGSSTSRPRWRPSSPRCRCRPPSPLTLACTRPEKPSPRPRQRPPTVSTRFRSQWTRRRRRQPRRPPPAVPRAPPKSAANDAAAA

SEQ ID NO: 34258 - protein, 157 aa, Homo sapiens
  MAP TO AL031709.10; EXPRESSED IN PLACENTA, SIGNAL = 1.7; SWISSPROT HIT: P13677, EVALUE 2.60e-02
RLKEELRLHKCSTRECIEQFYLDKLKQVGRRQGQGAASEAPRAQLRSPAFPQRTLEQNRFGRLSVRCHYEAAEQRLAVEVLHAADLLPLDANGELQRGRVGWWWDGGRGAHDCAPAGLSDPFVIVELGPPHLFPLVRSQRTQVKTRTLHPVYDELFY

SEQ ID NO: 34259 - protein, 65 aa, Homo sapiens
  MAP TO CHR19.1; EXPRESSED IN HEART, SIGNAL = 1.7; EXPRESSED IN ADULT LIVER, SIGNAL = 1.3; EXPRESSED IN LUNG, SIGNAL =   2
ARSSGLRKGERLSRSRLNLTPMEPRPADAASLAGVVLLTPSRISTATLDCSFTFREEQEDDEDEE

SEQ ID NO: 34260 - protein, 76 aa, Homo sapiens
  MAP TO CHR19.1; EXPRESSED IN ADULT LIVER, SIGNAL = 1.4; EXPRESSED IN LUNG, SIGNAL = 0.85; EXPRESSED IN HEART, SIGNAL = 0.96; SWISSPROT HIT: P47748, EVALUE 2.00e+00
EGFPTLLTLIRFLSSVSPFMISKGSGRNEGFTTLLTFIGFLSSVSPFMIVKGTGTIEGFTTVLAFIRFLSSVSSFM

SEQ ID NO: 34261 - protein, 43 aa, Homo sapiens
  MAP TO CHR19.1; EXPRESSED IN LUNG, SIGNAL = 1.1; EXPRESSED IN HEART, SIGNAL =  13; EXPRESSED IN ADULT LIVER, SIGNAL =  11; SWISSPROT HIT: Q11146, EVALUE 2.20e+00
LPPSPYRWGSAPTRSGSSWTVRPLRMTCPCVRASMRPQSSAST

SEQ ID NO: 34262 - protein, 85 aa, Homo sapiens
  MAP TO CHR1.1; EXPRESSED IN ADULT LIVER, SIGNAL = 2.4; EXPRESSED IN LUNG, SIGNAL =  16; SWISSPROT HIT: Q55027, EVALUE 6.80e+00
YSFGPDSFVEPDINARIWSSHLLHAKFPKLFECPRGTLLEAHSMDVLVNVDGVFSGHHLVDGRTALLFLPPFFAGAILPGPSWKG

SEQ ID NO: 34263 - protein, 104 aa, Homo sapiens
  MAP TO CHR9.1; EXPRESSED IN ADULT LIVER, SIGNAL =  10; EXPRESSED IN LUNG, SIGNAL = 2.3; EXPRESSED IN HEART, SIGNAL = 4.5; SWISSPROT HIT: P55072, EVALUE 1.00e-41
QAAPCVLFFDELDSIAKARGGNIGDGGGAADRVINQILTEMDGMSTKKNVFIIGATNRPDIIDPAILRPGRLDQLIYIPLPDEKSRVAILKANLRKSPVAKAGA

SEQ ID NO: 34264 - protein, 58 aa, Homo sapiens
  MAP TO CHR19.1; EXPRESSED IN ADULT LIVER, SIGNAL = 0.59; EXPRESSED IN LUNG, SIGNAL = 1.2; SWISSPROT HIT: O08550, EVALUE 1.50e-01
AFSGTVIEKEFVSPSLTPPPAIAHPALPTIPERKEVLLEASEETGKRVSKFKAARLQQ

SEQ ID NO: 34265 - protein, 59 aa, Homo sapiens
  MAP TO CHR7.1; EXPRESSED IN LUNG, SIGNAL = 0.58; EXPRESSED IN HEART, SIGNAL = 0.59; EXPRESSED IN ADULT LIVER, SIGNAL = 0.45; SWISSPROT HIT: P97523, EVALUE 3.00e-27
CRLDEKFTVKVADFGLARDMYDKEYYSVHNKTGAKLPVKWMALESLQTQKFTTKSDVVM

SEQ ID NO: 34266 - protein, 43 aa, Homo sapiens
  MAP TO CHR14.1; EXPRESSED IN ADULT LIVER, SIGNAL = 2.7; EXPRESSED IN LUNG, SIGNAL = 1.1; EXPRESSED IN HEART, SIGNAL = 1.7
GSRWPSSATVSLSASTATGTPCTYSHGTGWTQRLWTRGLPLSR

SEQ ID NO: 34267 - protein, 62 aa, Homo sapiens
  MAP TO CHR11.1; EXPRESSED IN HEART, SIGNAL = 1.5; EXPRESSED IN ADULT LIVER, SIGNAL = 0.92; EXPRESSED IN LUNG, SIGNAL = 2.5; SWISSPROT HIT: P12895, EVALUE 1.00e-06
APFLEVLQYQVDAWSGRSKLLFHLLFPKIHLIYCPRIEDVSDIKLIRTDTTLDLSQKAEKRY

SEQ ID NO: 34268 - protein, 56 aa, Homo sapiens
  MAP TO CHR11.1; EXPRESSED IN HEART, SIGNAL =   1; EXPRESSED IN ADULT LIVER, SIGNAL = 1.9; SWISSPROT HIT: P45484, EVALUE 4.70e+00
SNLDMKRSKTFLHGSGRASVPNSEITIRFLALLALYVSLCRNLLLYVTVPFAILNW

SEQ ID NO: 34269 - protein, 63 aa, Homo sapiens
  MAP TO CHR17.1; EXPRESSED IN ADULT LIVER, SIGNAL = 0.5; EXPRESSED IN LUNG, SIGNAL = 1.1
SLTHRSRHLPPLQHHILNDAPVRVDVDTLVLVAQQHLHAVGVGEEDDGMGRDLALDLGRRRGT

SEQ ID NO: 34270 - protein, 62 aa, Homo sapiens
  MAP TO CHR4.1; EXPRESSED IN ADULT LIVER, SIGNAL = 1.7; SWISSPROT HIT: P40798, EVALUE 2.00e-09
SPKCRFEYKRSETPSRYYCYCGKVEDPPLDPWLVPHSCGQVCEREFKPPCGHKCLLLCHPGE

SEQ ID NO: 34271 - protein, 83 aa, Homo sapiens
  MAP TO AC068936.2; EXPRESSED IN LUNG, SIGNAL =   2; EXPRESSED IN HEART, SIGNAL = 1.4; EXPRESSED IN ADULT LIVER, SIGNAL = 0.87; SWISSPROT HIT: P34369, EVALUE 7.00e-40
HSAYGNWFPGSKPLIQQAMAKIMKANPALYVLRERIRKGLQLYSSEPTEPYLSSQNYGELFSNQIIWFVDDTNVYRVTIHKVS

SEQ ID NO: 34272 - protein, 31 aa, Homo sapiens
  MAP TO CHR5.1; EXPRESSED IN LUNG, SIGNAL = 0.72; EXPRESSED IN HEART, SIGNAL = 0.89
YLVLHWILLATADQALLDQPVECQPPLGAQS

SEQ ID NO: 34273 - protein, 77 aa, Homo sapiens
  MAP TO CHR6.1; EXPRESSED IN LUNG, SIGNAL =  53; EXPRESSED IN HEART, SIGNAL = 9.4; SWISSPROT HIT: P30507, EVALUE 6.00e-42
TLRCWALGFYPAEITLTWQRDGEDQTQDTELVETRPAGDGTFQKWAAVVVPSGEEQRYTCHVQHEGLPKPLTLRWGK

SEQ ID NO: 34274 - protein, 52 aa, Homo sapiens
  MAP TO CHR19.1; EXPRESSED IN LUNG, SIGNAL = 0.72; EXPRESSED IN HEART, SIGNAL = 1.2
VPFAACCCSRILRVRGVVPLGMLMTYFPSISAVTRRRLAGTARLSSSRRARA

SEQ ID NO: 34275 - protein, 35 aa, Homo sapiens
  MAP TO CHR16.1; EXPRESSED IN HEART, SIGNAL = 4.4; EXPRESSED IN LUNG, SIGNAL =  17; SWISSPROT HIT: Q9Z313, EVALUE 3.00e-13
STESLQANVQRLKEYRSKLILFPRKPSAPKKGDSS

SEQ ID NO: 34276 - protein, 48 aa, Homo sapiens
  MAP TO CHR22.1; EXPRESSED IN HEART, SIGNAL = 0.53; SWISSPROT HIT: O08842, EVALUE 2.80e+00
GRLMDILRCRGKRGYEAFLEALEFYYPEHFTLLTGQEPAQRCSMILGE

SEQ ID NO: 34277 - protein, 27 aa, Homo sapiens
  MAP TO CHR5.1; EXPRESSED IN LUNG, SIGNAL = 0.94; EXPRESSED IN HEART, SIGNAL = 1.1
GLVLWIYESCPCKAWWMRSPEEGECGF

SEQ ID NO: 34278 - protein, 69 aa, Homo sapiens
  MAP TO CHR5.1; EXPRESSED IN HEART, SIGNAL = 0.48
ELRPPFQGQDEWEICKWPPPRSGRGGPAAGRRASLHLGLSHERVCIPAAGRLLARLGLFSPENKNVFQT

SEQ ID NO: 34279 - protein, 35 aa, Homo sapiens
  MAP TO CHR2.1; EXPRESSED IN HEART, SIGNAL = 0.56
FISSCEFLWTIDDIYHCAQFLQIKDGWIIFSMEGK

SEQ ID NO: 34280 - protein, 88 aa, Homo sapiens
  MAP TO CHR8.1; EXPRESSED IN HEART, SIGNAL = 0.64; SWISSPROT HIT: O74254, EVALUE 4.50e+00
PQSACNPTYNSSEHLFGTSYPYSAWCVYQYSNSNGNAITQTYQGITSYEVQPSPSGLLTTVASTAQGTHSNLLYSQYFTYFAGEPQAN

SEQ ID NO: 34281 - protein, 90 aa, Homo sapiens
  MAP TO CHR19.1; EXPRESSED IN LUNG, SIGNAL = 1.4; EXPRESSED IN HEART, SIGNAL = 0.6; SWISSPROT HIT: P53100, EVALUE 7.60e+00
TSLPLPAPSTTPHSGRSTPSSSPSLRKRLQLLPPSRPPPEPEPGTMVEKGSDSSSEKGGVPGTPSTQSLGSRNFIRNSKVGASPGGVGRG

SEQ ID NO: 34282 - protein, 80 aa, Homo sapiens
  MAP TO CHR17.1; EXPRESSED IN LUNG, SIGNAL = 0.66; SWISSPROT HIT: Q11011, EVALUE 7.00e-34
KNVIDRKPYPDDENLVEVKFARTPVMSTYLVAFVVGEYDFVETRSKDGVCVRVYTPVGKAEQGKFALEVNVLEEDCSNSP

SEQ ID NO: 34283 - protein, 39 aa, Homo sapiens
  MAP TO CHR19.1; EXPRESSED IN LUNG, SIGNAL = 0.69; SWISSPROT HIT: P19549, EVALUE 1.70e+00
QKSTRDRLARKKYMGVWRWESMLMARMMSRFPTTMTRYM

SEQ ID NO: 34284 - protein, 77 aa, Homo sapiens
  MAP TO CHR19.1; EXPRESSED IN LUNG, SIGNAL = 0.7
THLNSEEWLSSRPSLLSSSSTTSMTCLGTTSSFRRSRNFSSMASLSSFSRPSSFLMIFSCSCSRYLRWVCLIFSSTC

SEQ ID NO: 34285 - protein, 39 aa, Homo sapiens
  MAP TO AC005101.2; EXPRESSED IN HEART, SIGNAL = 0.93; SWISSPROT HIT: P40164, EVALUE 1.70e+00
AVMKIKCDQLCENIVENIRNYDDNVWLVTSEYSTELKGN

SEQ ID NO: 34286 - protein, 42 aa, Homo sapiens
  MAP TO AC004494.1; EXPRESSED IN HEART, SIGNAL = 1.2; SWISSPROT HIT: P53313, EVALUE 8.40e+00
TRDTDIKVLMRGIYFFLYAKRETAVQISHQKSEDFVLDNYYQ

SEQ ID NO: 34287 - protein, 40 aa, Homo sapiens
  MAP TO AC010527.4; EXPRESSED IN HEART, SIGNAL =   2
PWTALLLSSTCAGKTRGARVSMPMSLGSRIRGQGQVQRQR

SEQ ID NO: 34288 - protein, 61 aa, Homo sapiens
  MAP TO AC010527.4; EXPRESSED IN HEART, SIGNAL =   2
VPGPLCSCLLPVLARREVPGSQCQCLWALGSEARARCRGSGSPGPGEAGAAVPIQQSPERA
